(19) United States
(12) Patent Application Publication
(10) Pub. No.: US 2025/0276050 A1
(43) Pub. Date: Sep. 4, 2025

(54) VACCINE COMPOSITION FOR BREAKING SELF-TOLERANCE

(71) Applicant: BAYER ANIMAL HEALTH GMBH, Leverkusen (DE)

(72) Inventors: Thomas ILG, Monheim (DE); Christian WEISS, Leverkusen (DE); Sabrina FOIT, Monheim (DE)

(21) Appl. No.: 18/262,975

(22) PCT Filed: Jan. 29, 2022
(86) PCT No.: PCT/EP2022/052153

§ 371 Date: Jul. 26, 2023

(30) Foreign Application Priority Data
Jan. 29, 2021 (EP) 21154244.4

(51) Int. Cl. A61K 39/00; A61K 39/385; A61P 37/06; G01N 33/543; G01N 33/564; G01N 33/68

(52) U.S. Cl. CPC A61K 39/00114; A61K 39/385; A61P 37/06; G01N 33/543; G01N 33/564; G01N 33/6854; A61K 2039/552; A61K 2039/575; A61K 2039/6037; G01N 2333/54

(57) ABSTRACT

The present invention relates to a vaccine composition for breaking self-tolerance against a self-protein of a host, in particular for breaking self-tolerance against endogenous cytokines in an animal host. The vaccine composition of the invention contains a polyprotein, a DNA encoding for the polyprotein and/or an RNA encoding for the polyprotein and one or more immunostimulatory oligonucleotides. The polyprotein comprises at least two self-protein segments of the host and one or more T-cell epitopes of non-host origin in between and/or adjacent to the at least two self-protein segments.

The present invention further concerns the use of the vaccine composition for the prevention and/or treatment of diseases including the prevention and/or treatment of a pruritic condition and/or an allergic condition. In another aspect, the present invention provides a method for detecting the presence of autoantibodies against self-proteins that can be generated with the vaccine composition of the invention.

### FIELD OF THE INVENTION

[0001] The present invention relates to a vaccine composition for breaking self-tolerance against a self-protein of a host, in particular for breaking self-tolerance against endogenous cytokines, including cytokines derived from IL-4, IL-5, IL-13, IL-31, IL-33, and TNF-alpha proteins, and in particular the endogenous IL-31 protein, in a mammalian host. The present invention further concerns the use of the vaccine composition for the prevention and/or treatment of diseases including the prevention and/or treatment of a pruritic condition and/or an allergic condition. The present invention further concerns a polyprotein, which is derived from the self-protein and which is used as immunogen in the vaccine composition. In another aspect, the present invention provides a method for detecting the presence of autoantibodies against self-proteins that can be generated with the vaccine composition of the invention.

### BACKGROUND OF THE INVENTION

[0002] Vaccines are of paramount importance for the prevention and/or treatment of infectious diseases. Vaccine technology, however, also gains more and more importance for the prevention and/or treatment of noninfectious, often chronic diseases such as allergies, autoimmune diseases and cancer. The targets for these diseases are in general not foreign molecules but instead self-proteins or other self-antigens. Since the immune system has evolved to ensure tolerance for all self-proteins and self-antigens, it is very difficult to vaccinate against a self-protein. The research underlying the present invention aimed to find ways to circumvent or break self-tolerance.

[0003] Autoreactive B cells may be present in the circulation at low levels, but they do not expand or cause any harm, primarily due to the lack of T-cell help. In contrast, any self-reactive T cells that occur are either clonally deleted in the thymus or anergized in the periphery. It is known, however, that if a self-antigen is covalently coupled to a foreign (non-self) protein or part thereof, meaning that a fusion protein comprising self and non-self proteins or protein parts is provided, T-cells specific for the non-self-protein (part) are recruited and activated.

[0004] In parallel, the auto-reactive B cells may selectively take up the fusion protein containing self and non-self proteins/protein parts and therefore present both the self and the foreign peptides on MHC class II molecules. The non-self peptides presented by the autoreactive B cells are then recognized by the activated T-cells, which stimulate the autoreactive B cells to expand and initiate an immune response against the self-protein/self-antigen. If the immune response is strong enough, these self-produced antibodies have the capacity to reduce the level of the target self-protein. If a self-protein is chosen as target, which is responsible for or contributes to a disease, the in vivo generated autoantibodies can act as therapeutic antibodies by neutralizing the target self-protein. Such a robust immune response, however, is difficult to obtain.

[0005] In various pathologies including allergy, autoimmunity, cancer and AIDS an abnormal release of cytokines contributes to pathogenesis and/or disease progression.

[0006] Atopic dermatitis, for example, is a frequent allergic skin disorder that is characterized by aberrant and excessive Th2 cell and ILC2 activation, with robust expression of type 2 cytokines, including interleukin (IL)-4, IL-5, IL-13 and IL-31, and variable activation of other cytokines, in particular IL-22 and IL-33, but also IL-17, IL-9 and IFN-γ (Moyle et al. (2019) Experimental Dermatology, 28:756-768; Renert-Yuval & Guttman-Yassky (2019) Dermatol Clin 37:205-213). Atopic dermatitis is not only a frequent disorder in humans, but also in animals, in particular dogs. In fact, atopic dermatitis is the most common allergy in dogs and affects approximately 10% of the dog population, resulting in 15 million to 20 million dogs suffering from the disease in Europe and the United States alone (Griffin, et al. (2001), “The ACVD task force on canine atopic dermatitis (XIV): clinical manifestations of canine atopic dermatitis”, Veterinary immunology and immunopathology, 81 (3-4), 255-269). The itching or pruritus which is caused by this allergic skin disease is usually recurrent or chronic. It deeply impacts the quality of life for both the dogs and their owners.

[0007] In particular, the endogenous pruritogen, Interleukin-31 (IL-31), appears to play a critical role in atopic itch. Since IL-31 seems to be a key regulator of pruritus in atopic dermatitis in humans and dogs (Sonkoly et al., “IL-31: a new link between T cells and pruritus in atopic skin inflammation”, Journal of Allergy and Clinical Immunology 117.2 (2006): 411-417; Furue et al., “Emerging role of interleukin-31 and interleukin-31 receptor in pruritus in atopic dermatitis”, Allergy 73.1 (2018): 29-36; Gonzales et al., “Interleukin-31: its role in canine pruritus and naturally occurring canine atopic dermatitis.” Veterinary dermatology 24.1 (2013): 48-e12), IL-31 itself and its receptor binding has been a major focus for pharmacologically intervening itch in the context of atopic dermatitis.

[0008] Asthma is another highly prevelant condition with a pathophysiology linked to the abnormal release of cytokines, both of the Type 2, but also Type 1 type. Major targets of asthma-related treatment studies include IL-4, IL-5, and IL-13, as well as IL-33.

[0009] Different strategies have been pursued to treat conditions linked to aberrant cytokine production. In atopic dermatitis, for example, one of the strategies has focused on inhibiting downstream signal transduction using, e.g. kinase inhibitors. This strategy, however, has the disadvantage that the inhibitor has to be given repeatedly in short time intervals to the human or animal patient. Another strategy that has been widely used is the development of neutralizing monoclonal antibodies against a particular cytokine of interest in order to reduce circulating ligand levels and/or otherwise inhibit their receptor binding and thus biological activity. In atopic dermatitis, for example, anti-4, anti-5, anti-13, anti-17A, anti-17C, anti-22, anti-31, and anti-33 antibodies have been developed to prevent and/or treat this condition (Moyle et al. (2019) Experimental Dermatology, 28:756-768; Renert-Yuval & Guttman-Yassky (2019) Dermatol Clin 37:205-213). This strategy, however, has the disadvantage of high production costs due to the expensive antibody production procedure in cell culture and the need to repeat the antibody treatment in short intervals. Another disadvantage of this strategy is that typically progressive immunization against the monoclonal therapeutic antibody occurs in the patient so that in the long run, the therapeutic antibody treatment is no longer effective.

[0010] Bachmann et al. 2018 attempted to vaccinate against the cytokine, IL-31, by administering a vaccine which contains native, full-length IL-31 chemically coupled to virus-like particles (VLPs) derived from cucumber mosaic virus and containing a universal T-cell epitope (Bachmann et al., “Vaccination against IL-31 for the treatment of atopic dermatitis in dogs”, Journal of Allergy and Clinical Immunology 142.1 (2018): 279-281). The chemical coupling of native IL-31 to the VLP was achieved by derivatinzing IL-31 and the VLP coat proteins. IL-31 was derivatized with N-succinimidyl S-acetylthioacetate followed by deacetylation to introduce reactive SH-groups into IL-31. VLP coat proteins were derivatized with succinimidyl-6-((beta-maleimidopropionamido) hexanoate) to introduce SH-reactive chemical moieties. The derivatized preparations of IL-31 and VLPs were reacted with one another and purified. This strategy, however, has the disadvantage that the production of the IL-31-VLP conjugates is highly complex and expensive, requiring purified VLPs and IL-31, multiple chemical steps for derivatization and chemical coupling and subsequent purification. Moreover, a well-defined chemical product is not obtained by this production method. The obtained IL-31-VLP conjugates also contain non-natural components and chemical linkages whose biodegradability can be problematic.

[0011] A goal of the research underlying the present invention was to provide human and veterinary medicines in the form of therapeutic vaccines which can stimulate an immune response, in particular against deleterious cytokines.

### SUMMARY OF THE INVENTION

[0012] Against the aforementioned background, it is an object of the present invention to provide effective pharmacological means to inhibit or perturb the function of a disease-causing or disease-contributing target self-protein as compared to the means known in the art. It also is an object of the present invention to provide pharmacological means that induce a long lasting effect against the target self-protein in the host so that the pharmacological means need to be readministered only after a long time interval, preferably in the range of weeks, most preferably in the range of months. A further object of the invention is to provide pharmacological means that can be produced in an economical manner and are chemically well defined in their components.

[0013] In connection with the above objects, it is another object of the invention to provide a simple and effective method to investigate the effect of the pharmacological means of the invention to inhibit or perturb the function of a disease-involved or disease-causing target self-protein.

[0014] These objects are achieved by the vaccine composition according to claim 1, the polyprotein according to claim 18, the uses according to claims 19 and 20 and the method according to claim 24.

[0015] The invention provides a polyprotein, a DNA encoding for this polyprotein and/or an RNA encoding for this polyprotein for use in a vaccine composition to break self-tolerance against a self-protein of a host, wherein the polyprotein comprises at least two self-protein segments and one or more T-cell epitopes of non-host origin in between and/or adjacent to the at least two self-protein segments.

[0016] The research underlying the invention surprisingly found that a polyprotein comprising self-protein segments and non-host T-cell epitopes in between and/or adjacent to these self-protein segments is capable to break or circumvent the self-tolerance of a host against the self-protein segments of the polyprotein. The design of the polyprotein of the invention has not only immunological advantages, but also allows the administration of large amounts of the polyprotein of the invention, in particular subcutaneously, without producing significant negative effects caused by the self-protein segments in the polyprotein exerting their normal biological and/or disease-causing functions. This makes the polyprotein according to the invention a particularly suitable antigen for a vaccine composition.

[0017] The vaccine composition of the invention comprises the polyprotein, the DNA encoding for the polyprotein and/or the RNA encoding for the polyprotein according to the invention. More precisely, the invention provides a vaccine composition for breaking self-tolerance against a self-protein of a host, wherein the vaccine composition is capable of raising autoantibodies against said self-protein when the vaccine composition is administered to the host. The vaccine composition of the invention comprises:
[0018] a) a polyprotein, a DNA encoding for the polyprotein and/or an RNA encoding for the polyprotein, wherein the polyprotein comprises
   [0019] at least two self-protein segments of the host; and
   [0020] one or more T-cell epitopes of non-host origin in between and/or adjacent to the at least two self-protein segments;
[0021] and
[0022] b) one or more immunostimulatory oligonucleotides.

[0023] The inventors surprisingly found that a vaccine comprising a polyprotein containing self-protein segments and non-host T-cell epitopes in between and/or adjacent to the self-protein segments in combination with one or more immunostimulatory oligonucleotides as adjuvants is capable to induce a potent immune response against the self-protein segments of the polyprotein in the host to which the vaccine composition is administered. This potent immune response in the host includes the production of autoantibodies against the self-protein segments of the polyprotein. Experiments of the inventors showed that the autoantibodies produced after vaccination with the vaccine composition according to the invention also bind to the native self-proteins from which the self-protein segments were derived. The inventors further observed that the produced autoantibodies were present in the host's circulation system for weeks and could perturb or even neutralize the function of the bound self-proteins. Thus, the vaccine composition according to the invention allows the induction of a long lasting therapeutic autoantibody response in vivo.

[0024] The present invention also concerns the use of a polyprotein to break self-tolerance against a self-protein of a host, wherein the self-tolerance is broken by the production of autoantibodies when the polyprotein is administered to the host, and wherein the polyprotein comprises at least two self-protein segments, and one or more T-cell epitopes of non-host origin in between and/or adjacent to the at least two self-protein segments. This use is particularly relevant in prophylactic and therapeutic medical applications.

[0025] Further the invention concerns a vaccine composition according to the invention for use in a method of preventing or treating a disease in a subject, wherein the method comprises the step of administering the vaccine to the subject.

[0026] Lastly, the invention concerns an enzyme-linked immunosorbent assay for detecting neutralizing autoantibodies comprising the steps of
[0027] a) Adsorbing an antigen onto a test surface;
[0028] b) Blocking of free binding sites on the test surface;
[0029] c) Incubating the antigen-coated and blocked test surface with a mixture comprising a labeled neutralizing antibody against the antigen and a to-be-tested neutralizing autoantibody against the antigen; and
[0030] d) Detecting the binding of the labeled neutralizing antibody.

[0031] The assay according to the invention allows to determine in a robust und unambiguous fashion the presence of neutralizing autoantibodies against an antigen of interest, in particular after vaccination of a host with a vaccine composition according to the invention.

### DETAILED DESCRIPTION OF ILLUSTRATIVE EMBODIMENTS

### The Polyprotein

[0032] The polyprotein, the DNA encoding for the polyprotein or the RNA encoding for the polyprotein of the invention is designed to break self-tolerance against a self-protein of a host when administered to said host, e.g., in the vaccine composition of the invention. The polyprotein comprises at least two self-protein segments of the host and one or more T-cell epitopes of non-host origin in between and/or adjacent to the at least two self-protein segments of the host.

[0033] Breaking self-tolerance against a self-protein of a host means eliciting an immune response in a host which comprises the production of autoantibodies, preferably neutralizing autoantibodies, against the self-protein of the host. “To break self-tolerance against a self-protein of a host” therefore means “to elicit the production of autoantibodies, preferably neutralizing autoantibodies, against a self-protein of a host”. The term “autoantibody” as used herein refers to an antibody produced by a host which binds to a self-protein of this host. A “neutralizing autoantibody” perturbs and preferably entirely inhibits the biological function of the host's self-protein to which it binds. As an example, a neutralizing autoantibody against IL-31 perturbs and preferably substantially entirely inhibits the biological function of the same in the host. In particular, a neutralizing autoantibody against IL-31 perturbs and preferably entirely inhibits IL-31's role in the induction and onset of pruritus.

[0034] The polyprotein of the invention comprises two critical structural elements: self-protein segments of a host and T-cell epitopes of non-host origin.

[0035] The polyprotein of the invention comprises at least two self-protein segments, preferably at least three self-protein segments. Most preferably, the polyprotein according to the invention comprises three self-protein segments. Experiments of the inventors showed that when administered to a host, a polyprotein containing at least three self-protein segments is very potent in eliciting the production of autoantibodies in the host against the self-protein segments of the polyprotein and thus also against the native self-protein of the host from which the self-protein segments of the polyprotein were derived from.

[0036] The self-protein segments contained in the polyprotein of the invention can be the same or different. In particular, the self-protein segments can differ in length and/or amino acid sequence. The at least two self-protein segments are derived from the same self-protein. Good results were achieved when the same self-protein segment was used to make up the at least two self-protein segments of the polyprotein. In these cases, the polyprotein, when administered to a host, induces an immune response in the host which is focused on the production of autoantibodies against one type of self-protein or even one type of self-protein segment, both of which results in an autoimmune response against the native self-protein of the host that the protein segments were derived from.

[0037] A self-protein segment of the polyprotein according to the invention comprises at least one B-cell epitope. The term B-cell epitope as used herein means a linear or conformational proportion of the self-protein segment to which an autoantibody binds.

[0038] “Segments” as used herein means distinguishable and separate protein entities or domains. Thus, a single contiguous self-protein sequence of a host can only be considered as constituting at least two self-protein segments according to the invention if within the self protein sequence, segments have been separated by an intervening sequence (e.g., a T-cell epitope). Multiples of the same protein segment or different protein segments can also be directly fused to one another without any intervening sequences being present. Preferably, the intervening sequence comprises or consists of one or more T-cell epitopes of non-host origin.

[0039] The self-protein segment of the host can be
[0040] (i) a full-length self-protein; or
[0041] (ii) a truncated self-protein containing a B-cell epitope; or
[0042] (iii) a derivative of a self-protein which has at least 80% sequence identity, preferably at least 90% sequence identity and most preferably at least 95% sequence identity to the full-length self-protein.

[0043] The self-protein segments contained in the polyprotein according to the invention can all be of the same self-protein segment type or of different self-protein segment types wherein the self-protein segment type is selected from the group consisting of
[0044] (i) a full-length self-protein; or
[0045] (ii) a truncated self-protein containing a B-cell epitope; or
[0046] (iii) a derivative of a self-protein which has at least 80% sequence identity, preferably at least 90% sequence identity and most preferably at least 95% sequence identity to the self-protein.

[0047] Preferably, the self-protein segments of the polyprotein according to the invention are full-length self-proteins, preferably, multiple copies of the same full-length self-protein, e.g., IL-4, IL-5, IL-13, IL-31, IL-33, or TNF-alpha. For self-proteins where the full-length form is different from the mature form, the term “full-length” for the purpose of this invention, refers to the full-length mature form of said self-protein.

[0048] More preferably, the polyprotein according to the invention contains three self-protein segments wherein the self-protein segments are all full-length self-proteins. The use of full-length self-proteins in the polyprotein according to the invention (option (i)) has the advantage that the individual self-protein segments can in principle adapt their native fold. Because of this, the self-protein segment not only provides the same linear epitope but also the same conformational B-cell epitope as the native self-protein from which the self-protein segment of the host is derived from. This makes this type of self-protein segment in the polyprotein according to the invention particularly effective in breaking the self-tolerance of the host against the target self-protein.

[0049] The self-protein segment(s) contained in the polyprotein according to the invention can also be a truncated self-protein. In this case the truncation must be performed in a way that the remaining protein segment still contains at least one functioning B-cell epitope. The use of truncated self-proteins containing a B-cell epitope in the polyprotein according to the invention (option (ii)) has the advantage that the self-protein segments can be reduced in their size to primarily contain the relevant B-cell epitope(s). In this way, the polyprotein according to the invention can be reduced in size, which may aid in clonability and delivery, and/or it becomes possible to add even more self-protein segments in a polyprotein according to the invention while not exceeding a certain size limit of the polyprotein.

[0050] The self-protein segment(s) contained in the polyprotein according to the invention can be a derivative of a self-protein which has at least 80% sequence identity, preferably at least 90% sequence identity and most preferably at least 95% sequence identity to the full-length self-protein. Even more preferably, the derivative of the self-protein has 96%, 97%, 98% or 99% sequence identity to the full-length self-protein. A self protein segment according to the invention can at the same time fulfill the definition of a truncated self-protein and a derivative of a self-protein according to the invention.

[0051] Preferably, the polyprotein according to the invention contains only self-proteins and/or derivatives of a self-protein which has at least 80% sequence identity, preferably at least 90% sequence identity and most preferably at least 95%, 97%, 98% or 99% sequence identity to the full-length self-protein. More preferably, the polyprotein according to the invention contains three self-protein segments wherein the self-protein segments are full-length self-proteins and/or derivatives of a self-protein which has at least 80% sequence identity, preferably at least 90% sequence identity and most preferably at least 95%, 97%, 98% or 99% sequence identity to the full-length self-protein. The use of derivative self-proteins in the polyprotein according to the invention (option (iii)) can be advantageous for multiple reasons, for example, it could allow the expression of a more stable or more soluble polyprotein according to the invention. It is also advantageous to use derivative self-proteins in the polyprotein according to the invention which carry mutations leading to impaired or entirely inhibited biological functions of these derivate self-proteins. In this regard, it is in particular conceivable to use a self-protein which bears mutations leading to a loss of receptor engagement and/or signal transduction potential. Such a derivative self-protein can, for example, be obtained by site-directed mutagenensis of residues critical for receptor binding.

[0052] In one embodiment, the at least two self-protein segments of the polyprotein according to the invention are derived from a cytokine. Cytokine as defined herein has its normal meaning in the art. Cytokines can for example be grouped by structure into families, for example into the IL-1 family, the hematopoietin superfamily, the interferons, and the tumor necrosis factor family. For the IL-1 family, it is known that most members of this family are produced as inactive proproteins that are cleaved (removing an amino-terminal peptide) to produce the mature cytokine. In such cases, the full-length protein refers to the mature form of said self-protein. The exception to this rule is IL-1-alpha, for which both the proprotein and its cleaved forms are biologically active. The hematopoietin superfamily of cytokines includes non-immune-system growth and differentiation factors such as erythropoietin and growth hormone, as well as interleukins with roles in innate and adaptive immunity. Many of the soluble cytokines made by activated T cells are members of the hematopoietin family. The TNF family, of which TNF-alpha is the prototype, contains more than 17 cytokines with important functions in adaptive and innate immunity. Cytokines also include colony-stimulating factors.

[0053] In one embodiment, the at least two self-protein segments of the polyprotein according to the invention are derived from a cytokine selected from the group consisting of interleukin family members, tumor necrosis factor family members, interferon family members, and/or colony-stimulating factor family members. Examples of interleukin family members are interleukins selected from the group consisting of IL-1-alpha, IL-1-beta, IL-1 RA, IL-2, IL-3, IL-4, IL-5, IL-6, IL-7, IL-8, IL-9, IL-10, IL-11, IL-12, IL-13, IL-14, IL-15, IL-16, IL-17A-F, IL-18, IL-19, IL-20, IL-21, IL-22, IL-23, IL-24, IL-25, IL-26, IL-27, IL-28A,B, IL-29, IL-30, IL-31, IL-32, IL-33, IL-34, IL-35, IL-36-alpha, beta, or gamma, IL-36 Ra, IL-37, IL-38, IL-39, IL-40, IL-41, and IL-42, TSLP, leukemia inhibitory factor, and oncostatin, or a family member thereof. Examples of TNF family member self-proteins are proteins selected from the group consisting of TNF-alpha, lymphotoxin (LT)-alpha, LT-beta, CD40 ligand, Fas ligand, APRIL, LIGHT, TWEAK, and BAFF. Examples of IFN family member self-proteins are proteins selected from the group consting of IFN-alpha, IFN-beta, and IFN-gamma. Examples of colony-stimulating factor cytokines are granulocyte colony stimulating factor (G-CSF) and granulocyte-macrophage colony-stimulating factor (GM-CSF). Preferably, the self-protein segments are derived from a self-protein, in particular a cytokine, that is monomeric, homodimeric, homotrimeric, or homotetrameric. In a preferred embodiment, the polyprotein according to the invention comprises at least two, in particular two or three, self-protein segments, wherein the self-protein segments are derived from a cytokine selected from the group consisting of IL-1-alpha, IL-1-beta, IL-1 RA, IL-2, IL-3, IL-4, IL-5, IL-6, IL-7, IL-8, IL-9, IL-10, IL-11, IL-13, IL-14, IL-15, IL-16, IL-17A-F, IL-18, IL-19, IL-20, IL-21, IL-22, IL-24, IL-25, IL-26, IL-28A,B, IL-29, IL-30, IL-31, IL-32, IL-33, IL-34, IL-36-alpha, beta, or gamma, IL-36 Ra, IL-37, IL-38, IL-40, IL-41, and IL-42, TSLP, leukemia inhibitory factor, oncostatin, TNF-alpha, IFN-alpha, IFN-beta, and IFN-gamma, G-CSF, and GM-CSF.

[0054] In a particularly preferred embodiment, the at least two, and more preferably at least three, self-protein segments of the polyprotein according to the invention are derived from IL-4, IL-5, IL-13, IL-31, IL-33, or TNF-alpha, in particular from canine IL-4, canine IL-5, canine IL-13, canine IL-31, canine IL-33, or canine TNF-alpha. Preferably, the polyprotein according to the invention comprises three of the same self-protein segments, all derived from the same self-protein selected from the group consisting of IL-4, IL-5, IL-13, IL-31, IL-33, and TNF-alpha, in particular from the group consisting of canine IL-4, IL-5, IL-13, IL-31, IL-33, and TNF-alpha, in which case the host is a canine species.

[0055] In another particularly preferred embodiment, the at least two self-protein segments of the polyprotein according to the invention are derived from IL-31, in particular from canine IL-31. Preferably, thus, the self-protein is IL-31, in particular canine IL-31, in which case the host is a canine species.

[0056] The term “derived from” in connection with a (canine) self-protein (e.g. IL-4, IL-5, IL-13, IL-31, IL-33, or TNF-alpha) means that self-protein segments are selected from (i) the respective full-length (canine) protein, (ii) a truncated (canine) form of the protein containing a B-cell epitope or (iii) a derivative of the (canine) protein which has at least 80% sequence identity, preferably at least 90% sequence identity, preferably at least 95% sequence identity to the respective full-length (canine) self-protein.

[0057] Experiments of the inventors have shown that by administering a polyprotein according to the invention with self-protein segments derived from IL-31 to a host, in particular protein segments derived from canine IL-31 to a canine host, autoantibodies, against (canine) IL-31 protein can be efficiently raised. This polyprotein according to the invention was demonstrated to be able to particularly efficiently break the self-tolerance against (canine) IL-31.

[0058] The same was shown with self-protein segments derived from numerous other self-proteins, in particular by administering a polyprotein according to the invention with self-protein segments derived from canine IL-4, canine IL-5, canine IL-13, and canine IL-33, and administered to a canine host, as well as with self-protein segments derived from feline IL-31 and administered to a feline host, and with self-protein segments derived from bovine TNF-alpha-polyprotein and administered to a rabbit host. Antibodies against the respective (canine/feline/bovine) IL protein were efficiently raised and self-tolerance against it was efficiently broken in the form of neutralizing antibody production. Thus, the invention is in no way limited to the herein presented examples, but readily encompasses other self-proteins-both within and across species.

[0059] As used herein in connection with amino acid sequences, “percent sequence identity” and like terms are used to describe the sequence relationships between two or more amino acid sequence and are understood in the context of and in conjunction with the terms including: a) reference sequence, b) comparison window, c) sequence identity and d) percentage of sequence identity.
[0060] a) A “reference sequence” is a defined sequence used as a basis for sequence comparison. A reference sequence may be a subset of or the entirety of a specified sequence. For example, in the present case, the reference sequence for canine IL-31 is for example SEQ ID NO: 3; the reference sequence for canine IL-4 is for example SEQ ID NO: 56; the reference sequence for canine IL-5 is for example SEQ ID NO: 41; the reference sequence for canine IL-13 is for example SEQ ID NO: 46; the reference sequence for canine IL-33 is for example SEQ ID NO: 50 or SEQ ID NO: 51; the reference sequence for feline IL-31 is for example SEQ ID NO: 60; and the reference sequence for bovine TNF-alpha is for example SEQ ID NO: 64. SEQ ID NO: 50 and 51 differ only in that the 3 cysteine residues of SEQ ID NO: 50 (“IL-33-WT”) have been replaced by serine in SEQ ID NO: 51 (“IL-33-CS”). Replacing the cysteine residues with serine in this fashion was found by the inventors to further improve stability of the gene product.
[0061] b) A “comparison window” includes reference to a contiguous and specified part of an amino acid sequence, wherein the amino acid sequence may be compared to a reference sequence and wherein the portion of the amino acid sequence in the comparison window may comprise additions, substitutions, or deletions (i.e., gaps) compared to the reference sequence (which does not comprise additions, substitutions, or deletions) for optimal alignment of the two sequences. Those of skill in the art understand that to avoid a misleadingly high similarity to a reference sequence due to inclusion of gaps in the amino acid sequence a gap penalty is typically introduced and is subtracted from the number of matches.
[0062] c) Methods of alignment of sequences for comparison are well known in the art. Many pair-wise sequence alignment (PSA) methods have been developed such as EMBOSS (Rice et al., “EMBOSS: the European molecular biology open software suite”, (2000): 276-277), BLAST (Johnson et al., “NCBI BLAST: a better web interface”, Nucleic acids research 36.suppl_2 (2008): W5-W9.), CD-HIT (Li et al., “Cd-hit: a fast program for clustering and comparing large sets of protein or nucleotide sequences”, Bioinformatics 22.13 (2006): 1658-1659), ESPRIT (Sun et al., “ESPRIT: estimating species richness using large collections of 16S rRNA pyrosequences”, Nucleic acids research 37.10 (2009): e76-e76.), and UCLUST (Edgar, Robert, “Search and clustering orders of magnitude faster than BLAST”, Bioinformatics 26.19 (2010): 2460-2461.), etc.
[0063] d) “Percent identity” means the value determined by comparing two optimally aligned sequences over a comparison window, wherein the portion of the amino acid sequence in the comparison window may comprise additions, substitutions, or deletions (i.e., gaps) as compared to the reference sequence (which does not comprise additions, substitutions, or deletions) for optimal alignment of the two sequences. The percentage is calculated by determining the number of positions at which the identical amino acid occurs in both sequences to yield the number of matched positions, dividing the number of matched positions by the total number of positions in the window of comparison and multiplying the result by 100 to yield the percentage of sequence identity.

[0064] The polyprotein according to the invention comprises as second structural component one or more T-cell epitopes of non-host origin. The term “T-cell epitope” as used herein refers to short peptides which can bind to and thus be presented by major histocompatibility complex (MHC) molecules. MHC class I molecules can bind short peptides of 8 to 10 amino acids in length and MHC class II peptides of 13 to 17 amino acids in length. It is well known that T-cells recognize MHC molecules that have bound peptide epitopes derived from the intracellular processing of an antigen. The immunogenicity of a given epitope is dependent upon three factors: the generation of the appropriate peptide fragment from the antigen, the presence of MHC molecules that bind this fragment and the presence of T-cells capable of recognizing the complex.

[0065] The term “one or more” in connection with T-cell epitopes means that the same or different T-cell epitopes can be present in the polyprotein according to the invention. T-cell epitopes contained in the polyprotein of the invention can thus differ from each other in length and/or sequence.

[0066] The one or more T-cell epitopes can be selected from the group consisting of an artificial T-cell epitope peptide sequence and a T-cell epitope peptide sequence derived from a non-self protein, in particular from a pathogenic protein, which often harbor particularly potent T-cell epitopes. Suitable artificial T-cell epitopes or suitable pathogenic proteins from which a T-cell epitope can be derived from are known to the skilled person. Such T-cell epitopes are particularly immunogenic upon administration to a host.

[0067] Preferably, the polyprotein according to the invention comprises one or more universal T-cell epitopes of non-host origin. Most preferably, the polyprotein according to the invention comprises one or more T-cell epitopes wherein all the T-cell epitopes are universal. The term “universal T-cell epitope” as used herein refers to a T-cell epitope that is universally immunogenic and can be recognized in association with a large number of class II MHC molecules. Using universal T-cell epitopes in the polyprotein according to the invention has the advantage that the T-cell epitopes are particularly immunogenic independent from the chosen host.

[0068] Most preferably, the one or more T-cell epitopes contained in the polyprotein according to the invention are Tetanus Toxin T-cell epitopes, in particular Tetanus Toxin T-cell epitopes (i) comprising at least 95% sequence identity with SEQ ID NO: 1, SEQ ID NO: 2 or SEQ ID NO: 39 or (ii) selected from the group consisting of SEQ ID NO: 1, SEQ ID NO: 2 and SEQ ID NO: 39. Even more preferably, the one or more T-cell epitopes are derived from or are identical to SEQ ID NO: 1 or SEQ ID NO: 2. These T-cell epitopes are particularly immunogenic universal T-cell epitopes (Panina-Bordignon et al., “Universally immunogenic T cell epitopes: promiscuous binding to human MHC class II and promiscuous recognition by T cells”, European journal of immunology 19.12 (1989): 2237-2242).

[0069] Even more preferably, the T-cell epitope contained in the polyprotein according to the invention is a Tetanus Toxin T-cell epitope, in particular a Tetanus Toxin T-cell epitope (i) comprising at least 96, more preferably 97, and most preferably 98 or 99% sequence identity with SEQ ID NO: 1, SEQ ID NO: 39 or SEQ ID NO: 2 or (ii) selected from the group consisting of SEQ ID NO: 1, SEQ ID NO: 39 and SEQ ID NO: 2.

[0070] In the polyprotein according to the invention, the one or more T-cell epitopes of non-host origin are located in between and/or adjacent to the at least two self-protein segments. Preferably, the one or more T-cell epitopes of non-host origin are located in between and, optionally, additionally also adjacent to the at least two self-protein segments. The term “adjacent” in this context means “upstream of the most N-terminal protein segment and/or downstream of the most C-terminal protein segment”.

[0071] The polyprotein according to the invention can additionally comprise further components. One example of such additional components are one or more linkers in between the at least two self-protein segments and the one or more T-cell epitopes of non-host origin. These linkers can in particular be 4 to 50 amino acids in length, preferably 4 to 30 amino acids in length and most preferably 4 to 20 amino acids in length. The use of linkers is advantageous since the flexible linkers can facilitate the independent folding of the individual self-protein segments in the polyprotein according to the invention.

[0072] When a DNA and/or an RNA encoding for the polyprotein is used instead of the polyprotein itself, the DNA and/or RNA can also additionally encode one or more ER-import signals. An example of an amino acid sequence for an artificial ER signal is SEQ ID NO: 67. This ensures that upon expression of the polyprotein from DNA or RNA in the host the polyprotein is imported into the ER and later on secreted.

[0073] Preferably, the polyprotein for use in a vaccine composition to break self-tolerance against a self-protein of a host, comprises at least two self-protein segments of the host derived from a cytokine, preferably derived from a self-protein selected from the group consisting of a self-protein with an amino acid sequence of one of SEQ ID NO: 3, 41, 46, 50, 51, 56, 60, 64, or SEQ ID NO: 68-201; and one or more T-cell epitopes in between and/or adjacent to the at least two self-protein segments; wherein the one or more T-cell epitopes are Tetanus toxin T-cell epitopes (i) comprising at least 95% sequence identity with SEQ ID NO: 1, SEQ ID NO: 39 or SEQ ID NO: 2 or (ii) selected from the group consisting of SEQ ID NO: 1, SEQ ID NO: 39 and SEQ ID NO: 2. Most preferably, the one or more T-cell epitopes are Tetanus toxin T-cell epitopes (i) comprising at least 95% sequence identity with SEQ ID NO: 1 or SEQ ID NO: 2 or (ii) selected from the group consisting of SEQ ID NO: 1 and SEQ ID NO: 2.

[0074] More preferably, the polyprotein for use in a vaccine composition to break self-tolerance against a self-protein of a host, comprises at least two self-protein segments of the host derived from IL-4, IL-5, IL-13, IL-31, IL-33, or TNF-alpha, most preferably from IL-31; and one or more T-cell epitopes in between and/or adjacent to the at least two self-protein segments, wherein the one or more T-cell epitopes are Tetanus toxin T-cell epitopes (i) comprising at least 95% sequence identity with SEQ ID NO: 1, SEQ ID NO: 39 or SEQ ID NO: 2 or (ii) selected from the group consisting of SEQ ID NO: 1, SEQ ID NO: 39 and SEQ ID NO: 2. Most preferably, the one or more T-cell epitopes are Tetanus toxin T-cell epitopes (i) comprising at least 95% sequence identity with SEQ ID NO: 1 or SEQ ID NO: 2 or (ii) selected from the group consisting of SEQ ID NO: 1 and SEQ ID NO: 2.

[0075] More preferably, the polyprotein for use in a vaccine composition to break self-tolerance against a self-protein of a canine host, comprises at least two self-protein segments derived from a canine interleukin, in particular derived from canine IL-4, canine IL-5, canine IL-13, canine IL-31, or canine IL-33, most preferably from canine IL-31; and one or more T-cell epitopes in between and/or adjacent to the at least two self-protein segments, wherein the one or more T-cell epitopes are Tetanus toxin T-cell epitopes (i) comprising at least 95% sequence identity with SEQ ID NO: 1, SEQ ID NO: 39 or SEQ ID NO: 2 or (ii) selected from the group consisting of SEQ ID NO: 1, SEQ ID NO: 39 and SEQ ID NO: 2. Most preferably, the one or more T-cell epitopes are Tetanus toxin T-cell epitopes (i) comprising at least 95% sequence identity with SEQ ID NO: 1 or SEQ ID NO: 2 or (ii) selected from the group consisting of SEQ ID NO: 1 and SEQ ID NO: 2.

[0076] Experiments of the inventors have shown that by administering such a polyprotein to a canine host, autoantibodies, in particular neutralizing autoantibodies, against canine IL-4, IL-5, IL-13, IL-31, or IL-33 proteins can be raised in a particularly B class efficient manner. Analogous experiments of the inventors have also shown that by administering such a polyprotein to a feline host, autoantibodies, in particular neutralizing autoantibodies, against feline IL-31 can also be raised in a particularly B class efficient manner. Similarly, administering TNF-alpha to rabbits, in the polyprotein form according to the invention, induced efficient antibody production responsive to the TNF-alpha antigen. Thus, such a polyprotein according to the invention is very efficient in breaking self-tolerance against self-proteins, including but not limited to canine, feline, as well as bovine self-proteins.

[0077] Even more preferably, the polyprotein for use in a vaccine composition to break self-tolerance against a self-protein of a host has (i) at least 85% sequence identity with SEQ ID NO: 4 or SEQ ID NO: 40 or (ii) has the sequence of SEQ ID NO: 4 or SEQ ID NO: 40. More preferably, the polyprotein according to the invention has (i) at least 90%, more preferably 95% and most preferably 97%, 98% or 99% sequence identity with SEQ ID NO: 4 or SEQ ID NO: 40 or (ii) has the sequence of SEQ ID NO: 4 or SEQ ID NO: 40. SEQ ID NO: 4 and SEQ ID NO: 40 differ only in their N-terminus. In comparison to SEQ ID NO: 4 SEQ ID NO: 40 has three additional amino acids (“SHM”) at the N-terminus. The different N-termini of the polyproteins encoded by SEQ ID NO: 4 and SEQ ID NO: 40 result from different cleavage events of the N-terminal ER-signal sequence. Experiments of the inventors have shown that using a polyprotein encoding for SEQ ID NO: 4 or SEQ ID NO: 40 or for a derivative thereof with the aforementioned sequence identities are capable upon administration to a canine host to induce a highly efficient immune response including the production of autoantibodies, in particular neutralizing antibodies, against the cytokine IL-31.

[0078] In another preferable embodiment, the polyprotein for use in a vaccine composition to break self-tolerance against a self-protein of a host has (i) at least 85% sequence identity with SEQ ID NO: 61 or (ii) has the sequence of SEQ ID NO: 61. More preferably, the polyprotein according to the invention has (i) at least 90%, more preferably 95% and most preferably 97%, 98% or 99% sequence identity with SEQ ID NO: 61 or (ii) has the sequence of SEQ ID NO: 61. Experiments of the inventors have shown that using a polyprotein encoding for SEQ ID NO: 61 or for a derivative thereof with the aforementioned sequence identities are capable upon administration to a feline host to induce a highly efficient immune response including the production of autoantibodies, in particular neutralizing antibodies, against the cytokine IL-31.

[0079] In another preferable embodiment, the polyprotein for use in a vaccine composition to break self-tolerance against a self-protein of a host has (i) at least 85% sequence identity with SEQ ID NO: 42 or 43 or (ii) has the sequence of SEQ ID NO: 42 or 43. More preferably, the polyprotein according to the invention has (i) at least 90%, more preferably 95% and most preferably 97%, 98% or 99% sequence identity with SEQ ID NO: 42 or (ii) has the sequence of SEQ ID NO: 42 or 43. Experiments of the inventors have shown that using a polyprotein encoding for SEQ ID NO: 42 or 43 or for a derivative thereof with the aforementioned sequence identities are capable upon administration to a canine host to induce a highly efficient immune response including the production of autoantibodies, in particular neutralizing antibodies, against the cytokine IL-5.

[0080] In another preferable embodiment, the polyprotein for use in a vaccine composition to break self-tolerance against a self-protein of a host has (i) at least 85% sequence identity with SEQ ID NO: 57 or (ii) has the sequence of SEQ ID NO: 57. More preferably, the polyprotein according to the invention has (i) at least 90%, more preferably 95% and most preferably 97%, 98% or 99% sequence identity with SEQ ID NO: 57 or (ii) has the sequence of SEQ ID NO: 57. Experiments of the inventors have shown that using a polyprotein encoding for SEQ ID NO: 57 or for a derivative thereof with the aforementioned sequence identities are capable upon administration to a canine host to induce a highly efficient immune response including the production of autoantibodies, in particular neutralizing antibodies, against IL-4.

[0081] In another preferable embodiment, the polyprotein for use in a vaccine composition to break self-tolerance against a self-protein of a host has (i) at least 85% sequence identity with SEQ ID NO: 47 or (ii) has the sequence of SEQ ID NO: 47. More preferably, the polyprotein according to the invention has (i) at least 90%, more preferably 95% and most preferably 97%, 98% or 99% sequence identity with SEQ ID NO: 47 or (ii) has the sequence of SEQ ID NO: 47. Experiments of the inventors have shown that using a polyprotein encoding for SEQ ID NO: 47 or for a derivative thereof with the aforementioned sequence identities are capable upon administration to a canine host to induce a highly efficient immune response including the production of autoantibodies, in particular neutralizing antibodies, against IL-13.

[0082] In another preferable embodiment, the polyprotein for use in a vaccine composition to break self-tolerance against a self-protein of a host has (i) at least 85% sequence identity with SEQ ID NO: 54 or (ii) has the sequence of SEQ ID NO: 54. More preferably, the polyprotein according to the invention has (i) at least 90%, more preferably 95% and most preferably 97%, 98% or 99% sequence identity with SEQ ID NO: 54 or (ii) has the sequence of SEQ ID NO: 54. Experiments of the inventors have shown that using a polyprotein encoding for SEQ ID NO: 54 or for a derivative thereof with the aforementioned sequence identities are capable upon administration to a canine host to induce a highly efficient immune response including the production of autoantibodies, in particular neutralizing antibodies, against the cytokine IL-33.

[0083] In another preferable embodiment, the polyprotein for use in a vaccine composition to break self-tolerance against a self-protein of a host has (i) at least 85% sequence identity with SEQ ID NO: 65 or (ii) has the sequence of SEQ ID NO: 65. More preferably, the polyprotein according to the invention has (i) at least 90%, more preferably 95% and most preferably 97%, 98% or 99% sequence identity with SEQ ID NO: 65 or (ii) has the sequence of SEQ ID NO: 65. Experiments of the inventors have shown that using a polyprotein encoding for SEQ ID NO: 65 or for a derivative thereof with the aforementioned sequence identities are capable upon administration to a rabbit host to induce an efficient immune response against the cytokine TNF-alpha.

[0084] The skilled person knows how to clone the DNA or RNA sequence encoding the polyprotein of the invention into a suitable expression vector and how to produce the polyprotein of the invention.

[0085] In some embodiments, the polyprotein of the invention is produced by expression in cultured cells, e.g. such as HEK293 cells, in particular a fast-growing variant of the HEK293 cell line (HEK293-F), e.g. Expi293F cells. The expression in eukaryotic cells has the advantage that the expressed polyprotein is equipped with a glyosylation pattern similar or identical to that of the host. Preferably the polyprotein comprising (canine) IL-4, (canine) IL-5, (canine) IL-13, and/or (canine or feline) IL-31 is produced using mammalian expression.

[0086] In some embodiments, the polyprotein of the invention is produced by expression in prokaryotic cells, e.g. bacterial cells such as Escherichia (E.) coli. Any suitable strain of bacteria may be used. Suitable bacterial strains are well known in the art and the skilled person is capable of selecting one compatible for their system. Suitable strains include, but are in no way limited to, BL21 (DE3), BL21 (DE3)-pLysS, BL21-AI, Tuner, Origami, Rosetta, BL21 CodonPlus, BL21trxB, C41 (DE3), JM109, XL1-Blue, NEBexpress, and M15. A particularly suitable strain for the expression of the polyproteins of the invention, in particular the (canine) IL-33 and bovine TNF-alpha polyproteins of the invention, is BL21 (DE3) and variants thereof. Expression in bacterial cells has the advantages of simple procedure due to the less complex bacteria physiology, relatively low costs, short generation times, and high product yield.

[0087] The polyprotein of the invention can be encoded by a nucleic acid. The nucleic acid can be RNA or DNA. The nucleic acids can also comprise one or more nucleotides having a modified nucleobase. This can for example make the employed nucleic acid particularly stable against the attack of nucleases. The DNA or RNA encoding the polyprotein, in particular when encompassed in a suitable vector, can be used directly in the vaccine composition of the invention. The polyprotein is then expressed inside the host as is well-known for other DNA and RNA vaccines.

[0088] The nucleic acid encoding the polyprotein of the invention can be codon-optimized for efficient translation of the polyprotein in a eukaryotic cell or a host of interest. For example, codons can be optimized for expression in humans, cows, pigs, cats, dogs, bacteria, and so forth (see Codon Usage Database at www.kazusa.or.jp/codon/). Programs for codon optimization are available as freeware (e.g., OPTIMIZER at genomes.urv.es/OPTIMIZER; OptimumGene™ from GenScript at www.genscript.com/codon_opt.html). Commercial codon optimization programs are also available.

[0089] DNA encoding the polyprotein of the invention can be operably linked to at least one promoter control sequence. The DNA coding sequence can be operably linked to a promoter control sequence for expression in the eukaryotic cell or host of interest. The promoter control sequence can be a constitutive promoter control sequence.

[0090] Suitable constitutive promoter control sequences for expression in a eukaryotic cell, e.g. in a HEK293 cell include, but are not limited to, cytomegalovirus immediate early promoter (CMV), simian virus (SV40) promoter, adenovirus major late promoter, Rous sarcoma virus (RSV) promoter, mouse mammary tumor virus (MMTV) promoter, phosphoglycerate kinase (PGK) promoter, elongation factor (ED1)-alpha promoter, ubiquitin promoters, actin promoters, tubulin promoters, immunoglobulin promoters, fragments thereof, or combinations of any of the foregoing.

[0091] Suitable promoter control sequences for expression in a bacterial cell, e.g. in an E. coli cell include, but are not limited to, lac promoter, trc and tac promoter, T7 RNA polymerase, phage promoter pL, tetA promoter/operator, PPBAD promoter, PBAD promotor, fragments thereof, or combinations of any of the foregoing.

[0092] The DNA encoding the polyprotein of the invention also can be linked to a polyadenylation signal (e.g., SV40 polyA signal, bovine growth hormone (BGH) polyA signal, etc.) and/or at least one transcriptional termination sequence. This is particularly advantageous when using mammalian expression systems.

[0093] The DNA encoding the polyprotein of the invention can be present in a vector. Suitable vectors include plasmid vectors. Non-limiting examples of suitable plasmid vectors include pUC, pBR322, pET, pBluescript, pcDNA, pCI, pCMV, and variants thereof, wherein pcDNA-type vectors are particularly suitable. The vector can comprise additional expression control sequences (e.g., enhancer sequences, Kozak sequences, polyadenylation sequences, transcriptional termination sequences, etc.), selectable marker sequences (e.g., antibiotic resistance genes), origins of replication, and the like. Additional information can be found in “Current Protocols in Molecular Biology” Ausubel et al., John Wiley & Sons, New York, 2003 or “Molecular Cloning: A Laboratory Manual” Sambrook & Russell, Cold Spring Harbor Press, Cold Spring Harbor, NY, 3rd edition, 2001.

[0094] The nucleic acid encoding the polyprotein of the invention can also be RNA, in particular mRNA. The mRNA can be 5′ capped and/or 3′ polyadenylated.

[0095] Further, the nucleic acid encoding the polyprotein of the invention can be a self-replicating RNA. Self-replicating RNAs suitable for immunization are well-known in the field of RNA vaccines. A self-replicating RNA molecule can, when delivered to a eukaryotic cell, lead to the production of multiple daughter RNAs by transcription of itself. A self-replicating RNA molecule is typically a +-strand molecule which can be directly translated after its delivery to a cell. Translation of the self-replicating RNA molecules provides next to the encoded polyprotein of the invention also an RNA-dependent RNA polymerase which then produces both antisense and sense transcripts from the initially delivered RNA. The overall results of this sequence of transcriptions is an amplification in the number of the introduced self-replicating RNAs. In this way, the encoded polyprotein becomes a major polypeptide product of the cells harbouring the delivered self-replicating RNA. Suitable alphavirus self-replicating RNAs can use, e.g., a replicase from a sindbis virus, a semliki forest virus, an eastern equine encephalitis virus or a venezuelan equine encephalitis virus.

[0096] A preferred self-replicating RNA molecule thus encodes (i) an RNA-dependent RNA polymerase which can transcribe RNA from the self-replicating RNA molecule and (ii) the polyprotein of the invention. The polymerase can be an alphavirus RNA-dependent RNA polymerase. Whereas natural alphavirus genomes encode structural virion proteins in addition to the RNA-dependent RNA polymerase, it is preferred for the present invention that the self-replicating RNA molecule does not encode alphavirus structural proteins. Thus, a preferred self-replicating RNA used for the present invention can lead to the cellular production of RNA copies of itself, but not to the production of RNA-containing virions. As is known from the field of RNA vaccines, the alphavirus structural proteins which are necessary to produce infectious virions are absent from the self-replicating RNA used in the present invention and their place is taken by the construct encoding the polyprotein of the invention. The self-replicating RNA suitable for the present invention therefore can have two open reading frames. One open reading frame encodes an RNA-dependent RNA polymerase; the other open reading frame encodes the polyprotein of the invention. The self-replicating RNA may have additional (e.g. downstream) open reading frames, e.g., to encode one or more further polyproteins of the invention.

### The Vaccine Composition

[0097] The invention further provides a vaccine composition for breaking self-tolerance against a self-protein of a host. The vaccine composition according to the invention comprises two mandatory components:
[0098] a) a polyprotein, a DNA encoding for the polyprotein and/or an RNA encoding for the polyprotein, wherein the polyprotein comprises
   [0099] at least two self-protein segments of the host; and
   [0100] one or more T-cell epitopes of non-host origin in between and/or adjacent to the at least two self-protein segments;
[0101] and
[0102] b) one or more immunostimulatory oligonucleotides.

[0103] The vaccine composition is capable of raising autoantibodies against the self-protein when the vaccine composition is administered to the host.

[0104] The polyprotein is as described above.

[0105] The vaccine composition of the invention comprises the one or more immunostimulatory oligonucleotides as adjuvants. The term “one or more” used in connection with the immunostimulatory oligonucleotides of the invention means that chemically different oligonucleotides may be part of the vaccine composition of the invention. For example, oligonucleotides of different length, base sequences or differences in the sugar phosphate backbones can be used. The “one” in “one or more” is not meant to refer to single oligonucleotides molecules.

[0106] An “immunostimulatory oligonucleotide” as used herein is an oligonucleotide that elicits an immune response in a vertebrate by being detected as foreign by the vertebrate's innate immune system and thereby activating innate immune response pathways.

[0107] Typically, the immunostimulatory oligonucleotides of the invention are of synthetic origin. Thus, they can be synthesized with any desired sequence and/or with modifications in the sugar phosphate backbone.

[0108] The one or more immunostimulatory oligonucleotides are linear, at least partially single-stranded DNA molecules. The single-stranded DNA immunostimulatory oligonucleotides may, however, interact with themselves or each other inter alia by Watson-Crick base pairing to form secondary structures and agglomerates. Single-stranded stretches will, however, always be present in the immunostimulatory oligonucleotides.

[0109] Preferably, the one or more immunostimulatory oligonucleotides are CpG oligodesoxynucleotides (CpG ODN). These are short single-stranded synthetic DNA molecules that contain a cytosine triphosphate deoxynucleotide (“C”) followed by a guanine triphosphate deoxynucleotide (“G”). The “p” refers to the phosphodiester link between consecutive nucleotides, although an ODN according to the invention may have a modified phosphorothioate backbone instead. Using CpG ODNs as immunostimulatory oligonucleotides has the advantage that CpG dinucleotides represent pathogen-associated molecular patterns (PAMPs) sensed by the Toll-like receptors (TLR) 9. Activation of TLR9 leads to the activation of different proinflammatory signaling pathways dependent on, e.g., nuclear factor ‘kappa-light-chain-enhancer’ of activated B-cells (NF-κB). Activation of NF-κB typically leads to the expression of proinflammatory cytokines. Accordingly, CpG ODNs are particularly potent vaccine adjuvants in the vaccine composition according to the invention.

[0110] Preferably, the immunostimulatory oligonucleotides are selected from the group consisting of A-class, B-class and C-class immunostimulatory oligonucleotides. The classification of immunostimulatory oligonucleotides into “A-class”, “B-class” and “C-class” is well-known to the skilled person and described, e.g., in Vollmer, Jörg. “CpG motifs to modulate innate and adaptive immune responses”, International reviews of immunology 25.3-4 (2006): 125-134.

[0111] A-class immunostimulatory oligonucleotides are typically characterized by a central phosphodiester CpG-containing palindromic motif and a partially phosphorothioate-modified backbone, in particular a phosphorothioate 3′ poly-G stretch.

[0112] B-class immunostimulatory oligonucleotides are typically characterized by a full phosphorothioate backbone with one or more CpG dinucleotides.

[0113] C-class immunostimulatory oligonucleotides exhibit properties of class A and class B immunostimulatory oligonucleotides. They contain a full phosphorothioate backbone and one or more palindromic CpG-containing motif(s).

[0114] The immunostimulatory oligonucleotides according to the invention typically have a length of from 14 to 500 nucleotides, preferably from 14 to 400 nucleotides, more preferably from 14 to 300 nucleotides, still more preferably from 14 to 200 nucleotides, even more preferably from 16 to 40 and most preferably from 18 to 30 nucleotides. Immunostimulatory oligonucleotides of this size can be easily synthesized in vitro and were found to be effective as vaccine adjuvants.

[0115] Preferably, the one or more immunostimulatory oligonucleotides are selected from the group consisting of B-class immunostimulatory oligonucleotides. The research underlying the invention demonstrated that B-class immunostimulatory oligonucleotides in the vaccine composition according to the invention, are particularly efficient to enhance the immunogenicity of the polyprotein used in the vaccine composition according to the invention.

[0116] The one or more immunostimulatory oligonucleotides can also preferably comprise at least 75% sequence identity, more preferably at least 80% sequence identity, even more preferably 85% sequence identity, still more preferably 90%, 95% or 97% sequence identity with SEQ ID NO: 5 or SEQ ID NO: 6.

[0117] As used herein in connection with nucleic acid sequences, “percent sequence identity” and like terms are used to describe the sequence relationships between two or more nucleic acids and are understood in the context of and in conjunction with the terms including: a) reference sequence, b) comparison window, c) sequence identity and d) percentage of sequence identity.
[0118] a) A “reference sequence” is a defined sequence used as a basis for sequence comparison. A reference sequence may be a subset of or the entirety of a specified sequence; for example, a segment of a full-length cDNA or gene sequence, or the complete cDNA or gene sequence. In the present case, the reference sequence is SEQ ID NO: 5 or SEQ ID NO: 6.
[0119] b) A “comparison window” includes reference to a contiguous and specified segment of a polynucleotide sequence, wherein the polynucleotide sequence may be compared to a reference sequence and wherein the portion of the polynucleotide sequence in the comparison window may comprise additions, substitutions, or deletions (i.e., gaps) compared to the reference sequence (which does not comprise additions, substitutions, or deletions) for optimal alignment of the two sequences. Those of skill in the art understand that to avoid a misleadingly high similarity to a reference sequence due to inclusion of gaps in the polynucleotide sequence a gap penalty is typically introduced and is subtracted from the number of matches.
[0120] c) Methods of alignment of sequences for comparison are well known in the art. Optimal alignment of sequences for comparison may be conducted by the local homology algorithm of Smith and Waterman, Adv. Appl. Math., 2:482, 1981; by the homology alignment algorithm of Needleman and Wunsch, J. Mol. Biol., 48:443, 1970; by the search for similarity method of Pearson and Lipman, Proc. Natl. Acad. Sci. USA, 8:2444, 1988; by computerized implementations of these algorithms, including, but not limited to: CLUSTAL in the PC/Gene program by Intelligenetics, Mountain View, Calif., GAP, BESTFIT, BLAST, FASTA, and TFASTA in the Wisconsin Genetics Software Package, Genetics Computer Group (GCG), 7 Science Dr., Madison, Wis., USA; the CLUSTAL program is well described by Higgins and Sharp, Gene, 73:237-244, 1988; Corpet, et al., Nucleic Acids Research, 16:881-90, 1988; Huang, et al., Computer Applications in the Biosciences, 8:1-6, 1992; and Pearson, et al., Methods in Molecular Biology, 24:7-331, 1994. The BLAST family of programs which may be used for database similarity searches includes: BLASTN for nucleotide query sequences against nucleotide database sequences; BLASTX for nucleotide query sequences against protein database sequences; TBLASTN for protein query sequences against nucleotide database sequences; and TBLASTX for nucleotide query sequences against nucleotide database sequences. See, Current Protocols in Molecular Biology, Chapter 19, Ausubel, et al., Eds., Greene Publishing and Wiley-Interscience, New York, 1995. New versions of the above programs or new programs altogether will undoubtedly become available in the future, and may be used with the present disclosure.
[0121] d) “Percent identity” means the value determined by comparing two optimally aligned sequences over a comparison window, wherein the Portion of the polynucleotide sequence in the comparison window may comprise additions, substitutions, or deletions (i.e., gaps) as compared to the reference sequence (which does not comprise additions, substitutions, or deletions) for optimal alignment of the two sequences. The percentage is calculated by determining the number of positions at which the identical nucleic acid base occurs in both sequences to yield the number of matched positions, dividing the number of matched positions by the total number of positions in the window of comparison and multiplying the result by 100 to yield the percentage of sequence identity.

[0122] Preferably, the one or more immunostimulatory oligonucleotides are selected from the group consisting of SEQ ID NO: 5 and SEQ ID NO: 6. Experimental studies have shown that the use of immunostimulatory oligonucleotides encoding for SEQ ID NO: 5 or SEQ ID NO: 6 in the vaccine composition according to the invention are particularly efficient in activating NF-κB proinflammatory response pathways in canine cells and thus strongly enhance the immunogenicity of the polyprotein in the vaccine composition according to the invention.

[0123] Preferably, the one or more immunostimulatory oligonucleotides comprise a phosphorothioate in the sugar-phosphate backbone, i.e. a partially phosphorothioate-modified backbone. More preferably, the one or more immunostimulatory oligonucleotides comprise a full phosphorothioate backbone. Phosphorothioate modification has the advantage that the immunostimulatory oligonucleotides are protected from degradation by nucleases. As a consequence, the immunostimulatory activity of these immunostimulatory oligonucleotides is increased.

[0124] The vaccine composition of the invention can comprise additional components. Preferably, the vaccine composition of the invention additionally comprises an adjuvant c) conferring a depot effect for the polyprotein and/or the immunostimuluatory oligonucleotides contained in the vaccine composition of the invention. The term “depot effect” refers to the sustained release of the polyprotein and/or the immunostimulatory oligonucleotides from the site of injection. Using such an adjuvant in the vaccine composition according to the invention has the advantage that the immunogenicity of the polyprotein and of the immunostimulatory oligonucleotides in the vaccine composition is further increased so that the self-tolerance against the self-proteins in the polyprotein is broken particularly efficiently.

[0125] Most preferably, the adjuvant conferring a depot effect is a copolymer adjuvant capable to form a cross-linked high molecular weight gel in solution. An example of such an adjuvant is Polygen™. A suitable adjuvant conferring a depot effect could also be a mineral or metabolisable oil combined with a surfactant system. Experiments of the inventors have shown that a copolymer adjuvant capable of forming a cross-linked high molecular weight gel in solution is highly compatible with and a suitable carrier for the other components of the vaccine composition according to the invention and provides at the same time a particularly high degree of safety in companion and farm animals.

[0126] The vaccine composition according to the invention, in particular when containing DNA or RNA encoding for the polyprotein, can contain liposomes, cationic proteins, cationic polymers or cationic cell penetrating peptides and/or other chemical means which enhance half-life, cellular upatake and translatability of the introduced nucleic acids.

[0127] Thus, preferably, the vaccine composition according to the invention for breaking self-tolerance against a self-protein of a host, wherein the vaccine composition is capable of raising autoantibodies against said self-protein when the vaccine composition is administered to the host, and wherein the vaccine composition comprises:
[0128] a) a polyprotein, a DNA encoding for the polyprotein and/or an RNA encoding for the polyprotein, wherein the polyprotein comprises
   [0129] at least two self-protein segments of the host; and
   [0130] one or more T-cell epitopes of non-host origin in between and/or adjacent to the at least two self-protein segments;
[0131] and
[0132] b) one or more immunostimulatory oligonucleotides and
[0133] c) an adjuvant conferring a depot effect.

[0134] Even more preferably, the vaccine composition according to the invention for breaking self-tolerance against a self-protein of a host, wherein the vaccine composition is capable of raising autoantibodies against said self-protein when the vaccine composition is administered to the host, and wherein the vaccine composition comprises:
[0135] a) a polyprotein, a DNA encoding for the polyprotein and/or an RNA encoding for the polyprotein, wherein the polyprotein comprises
   [0136] at least two self-protein segments derived from a cytokine of the host, preferably from IL-4, IL-5, IL-13, IL-31, IL-33, or TNF-alpha of the host, most preferably from IL-31 of the host; and
   [0137] one or more T-cell epitopes of non-host origin in between and/or adjacent to the at least two self-protein segments wherein the one or more T-cell epitopes are Tetanus toxin T-cell epitopes (i) comprising at least 95% sequence identity with SEQ ID NO: 1, SEQ ID NO: 39 or SEQ ID NO: 2 or (ii) selected from the group consisting of SEQ ID NO: 1, SEQ ID NO: 39 and SEQ ID NO: 2; preferably the one or more T-cell epitopes are Tetanus toxin T-cell epitopes (i) comprising at least 95% sequence identity with SEQ ID NO: 1 or SEQ ID NO: 2 or (ii) selected from the group consisting of SEQ ID NO: 1 and SEQ ID NO: 2;
[0138] and
[0139] b) one or more immunostimulatory oligonucleotides, wherein the one or more immunostimulatory oligonucleotides comprise at least 75% sequence identity, more preferably at least 80% sequence identity, even more preferably 85% sequence identity, still more preferably 90%, 95% or 97% sequence identity with SEQ ID NO: 5 or SEQ ID NO: 6 or are selected from the group consisting of SEQ ID NO: 5 and SEQ ID NO: 6
[0140] and
[0141] c) an adjuvant conferring a depot effect wherein the adjuvant conferring a depot effect is a copolymer adjuvant capable to form a cross-linked high molecular weight gel in solution.

[0142] Experiments of the inventors have shown that such a vaccine composition is particularly effective in breaking self-tolerance against IL-4, IL-5, IL-13, IL-31, IL-33, and TNF-alpha, in particular canine IL-5, IL-13, IL-31, and IL-33, as well as feline IL-31 and bovine TNF-alpha. These results show that the invention offers a flexible platform to express and vaccinate against a large number of self-proteins, and is not limited to only those described here.

[0143] The skilled person knows how to identify and analyze individual components of a vaccine composition. To analyze the claimed vaccine composition, the skilled person typically first preforms an extraction and/or separation procedure to separate the individual components from each other, e.g., by using liquid chromatography, in particular HPLC. The nucleic acids used in the claimed vaccine composition can be analyzed, e.g., by mass spectrometry and/or sequencing analysis. Proteins in the vaccine composition can also be analyzed, e.g., by mass spectrometry. The immunostimulatory properties of the oligonucleotides contained in the vaccine composition of the invention can be assessed by using a reporter cell line, e.g., a dog monocyte cell line (DH82) allowing to evaluate the NFkB-stimulating potential of these oligonucleotides.

### Use of the Polyprotein

[0144] The invention also concerns the use of the polyprotein, DNA encoding for the polyprotein and/or RNA encoding for the polyprotein as described herein in a vaccine composition to break self-tolerance against a self-protein of a host, wherein the polyprotein comprises at least two self-protein segments of the host and one or more T-cell epitopes of non-host origin in between and/or adjacent to the at least two self-protein segments. In the research that led up to the invention, it was found that the use of polyprotein according to the invention makes it possible to efficiently induce the production of autoantibodies, in particular neutralizing autoantibodies, against the self-protein segments of the polyprotein and thus the native self-protein of the host from which the self-protein segment of the polyprotein were derived.

[0145] It seems that the presence of T-cell epitopes of non-host origin in the polyprotein according to the invention, in particular the presence of Tetanus toxin T-cell epitopes, allows to efficiently break the self-tolerance against the self-protein segments of the host.

[0146] In preferred uses, the polyprotein has one or more of the characteristics defined for the polyprotein according to the invention above.

### Use of the Vaccine Composition

[0147] The vaccine compositions described herein are suitable for use in a method of preventing or treating a disease in a subject, wherein the method comprises the step of administering the vaccine composition to the subject. This method comprises administering to a subject an effective amount of the immunostimulatory vaccine to elicit an immune response in the subject. The immune response comprises the induction of autoantibodies, preferably neutralizing antibodies, against the targeted self-protein of the subject. The terms “subject” and “host” are used interchangeably herein.

[0148] Upon using the vaccine compositions described herein, in particular with a polyprotein containing self-protein segments derived from (canine) IL-4, L-5, IL-13, IL-31, IL-33, or TNF-alpha, it is possible to break self-tolerance against the respective self-protein, in a subject of interest.

[0149] It is believed that the breaking of the subject's self-tolerance towards a disease-causing self-protein allows to prevent or treat the disease caused or influenced by this self-protein since the autoantibodies neutralize the function of the self-protein and/or help to reduce the available levels of the self-protein in the subject. The self-protein from which the self-protein segments in the polyprotein of the invention are derived from is also referred to herein as the targeted self-protein in the host.

[0150] Subject as used herein may in particular mean a mammal species such as humans and non-human animals. Thus, the subject is a mammal including humans and non-human animals. Preferably, the subject is a non-human animal, in particular a non-human animal selected from the group consisting of cattle, poultry, swine, and companion animals such as cats and dogs. Most preferably, the subject is an animal, in particular an animal selected from the group consisting of cattle, poultry, swine, and companion animals such as a cats and a dogs. Even more preferably, the subject is a dog.

[0151] Preferably, the vaccine compositions described herein are used to the prevent or treat
[0152] a chronic diseases selected from the group consisting of an autoimmune disease, AIDS and cancer; or
[0153] a pruritic condition, in particular selected from the group consisting of atopic dermatitis, eczema, psoriasis, scleroderma and pruritis; or
[0154] an allergic condition, in particular selected from the group consisting of allergic dermatitis, summer eczema, urticaria, heaves, inflammatory airway disease, recurrent airway obstruction, airway hyper-responsiveness, chronic obstruction pulmonary disease and inflammatory process resulting from autoimmunity.

[0155] The term “allergic condition” is defined herein as a disease or disorder caused by an interaction between the immune system and a substance foreign to the body.

[0156] The term “pruritic condition” is defined herein as a disease or disorder characterized by an intense itching sensation that produces the urge to rub or scratch the skin to obtain relief.

[0157] More preferably, the vaccine compositions described herein are used to the prevent or treat
[0158] a pruritic condition, in particular selected from the group consisting of atopic dermatitis, eczema, psoriasis, scleroderma and pruritis; or
[0159] an allergic condition, in particular selected from the group consisting of allergic dermatitis, summer eczema, urticaria, heaves, inflammatory airway disease, recurrent airway obstruction, airway hyper-responsiveness, chronic obstruction pulmonary disease and inflammatory process resulting from autoimmunity.

[0160] Most preferably, the vaccine compositions described herein are used to prevent or treat atopic dermatitis.

[0161] In a preferred embodiment, the vaccine compositions described herein comprising self-protein segments derived from canine IL-31 are used to the prevent or treat
[0162] a chronic diseases selected from the group consisting of an autoimmune disease, AIDS and cancer; or
[0163] a pruritic condition, in particular selected from the group consisting of atopic dermatitis, eczema, psoriasis, scleroderma and pruritis; or
[0164] an allergic condition, in particular selected from the group consisting of allergic dermatitis, summer eczema, urticaria, heaves, inflammatory airway disease, recurrent airway obstruction, airway hyper-responsiveness, chronic obstruction pulmonary disease and inflammatory process resulting from autoimmunity.

[0165] Most preferably, the vaccine compositions described herein comprise at least two self-protein segments, in particular at least three self-protein segments, derived from canine IL-31 and are used to prevent or treat atopic dermatitis.

[0166] In another embodiment, the vaccine compositions described herein comprise self-protein segments derived from canine IL-5 and are used to the prevent and/or treat
[0167] a pruritic condition, in particular selected from the group consisting of atopic dermatitis, eczema, psoriasis, scleroderma and pruritis; and/or
[0168] an eosinophilic disorders, in particular eosinophilic asthma, eosinophilic esophagitis, hypereosinophilic syndromes, and chronic rhinosinusitis, in particular chronic rhinosinusitis with nasal polyps.

[0169] More preferably, the vaccine compositions described herein comprise at least two self-protein segments, in particular at least three self-protein segments, derived from canine IL-5 and are used to prevent and/or treat
[0170] atopic dermatitis; or
[0171] eosinophilic asthma or chronic rhinosinusitis with nasal polyps.

[0172] In another embodiment, the vaccine compositions described herein comprise at least two self-protein segments derived from canine IL-4 and are used to the prevent or treat
[0173] a chronic diseases selected from the group consisting of an autoimmune disease, AIDS and cancer; or
[0174] a pruritic condition, in particular selected from the group consisting of atopic dermatitis, eczema, psoriasis, scleroderma and pruritis; or
[0175] an allergic condition, in particular selected from the group consisting of allergic dermatitis, summer eczema, urticaria, heaves, inflammatory airway disease, recurrent airway obstruction, airway hyper-responsiveness, chronic obstruction pulmonary disease and inflammatory process resulting from autoimmunity.

[0176] More preferably, the vaccine compositions comprising IL-4 described herein comprise at least two self-protein segments, in particular at least three self-protein segments, derived from canine IL-4 and are used to prevent or treat
[0177] a pruritic condition, in particular selected from the group consisting of atopic dermatitis, eczema, psoriasis, scleroderma and pruritis; or
[0178] an allergic condition, in particular selected from the group consisting of allergic dermatitis, summer eczema, urticaria, heaves, inflammatory airway disease, recurrent airway obstruction, airway hyper-responsiveness, chronic obstruction pulmonary disease and inflammatory process resulting from autoimmunity.

[0179] Most preferably, the vaccine compositions described herein comprise at least two self-protein segments, in particular at least three self-protein segments, derived from canine IL-4 and are used to prevent or treat atopic dermatitis.

[0180] In a further embodiment, the vaccine compositions described herein comprise at least two self-protein segments, in particular at least three self-protein segments, derived from canine IL-13 and are used to the prevent or treat
[0181] a chronic diseases selected from the group consisting of an autoimmune disease, AIDS and cancer; or
[0182] a pruritic condition, in particular selected from the group consisting of atopic dermatitis, eczema, psoriasis, scleroderma and pruritis; or
[0183] an allergic condition, in particular selected from the group consisting of allergic dermatitis, summer eczema, urticaria, heaves, inflammatory airway disease, recurrent airway obstruction, airway hyper-responsiveness, chronic obstruction pulmonary disease and inflammatory process resulting from autoimmunity.

[0184] More preferably, the vaccine compositions comprising IL-13 described herein comprise at least two self-protein segments, in particular at least three self-protein segments, derived from canine IL-13 and are used to prevent or treat
[0185] a pruritic condition, in particular selected from the group consisting of atopic dermatitis, eczema, psoriasis, scleroderma and pruritis; or
[0186] an allergic condition, in particular selected from the group consisting of allergic dermatitis, summer eczema, urticaria, heaves, inflammatory airway disease, recurrent airway obstruction, airway hyper-responsiveness, chronic obstruction pulmonary disease and inflammatory process resulting from autoimmunity.

[0187] Most preferably, the vaccine compositions described herein comprise at least two self-protein segments, in particular at least three self-protein segments, derived from canine IL-13 and are used to prevent or treat atopic dermatitis.

[0188] In another embodiment, the vaccine compositions described herein comprise at least two self-protein segments, in particular at least three self-protein segments, derived from canine IL-33 and are used to the prevent or treat
[0189] a chronic diseases selected from the group consisting of an autoimmune disease, AIDS and cancer; or
[0190] a pruritic condition, in particular selected from the group consisting of atopic dermatitis, eczema, psoriasis, scleroderma and pruritis; or
[0191] an allergic condition, in particular selected from the group consisting of allergic dermatitis, summer eczema, urticaria, heaves, inflammatory airway disease, recurrent airway obstruction, airway hyper-responsiveness, chronic obstruction pulmonary disease and inflammatory process resulting from autoimmunity.

[0192] More preferably, the vaccine compositions comprising IL-33 described herein comprise at least two self-protein segments, in particular at least three self-protein segments, derived from canine IL-33 and are used to prevent or treat
[0193] a pruritic condition, in particular selected from the group consisting of atopic dermatitis, eczema, psoriasis, scleroderma and pruritis; or
[0194] an allergic condition, in particular selected from the group consisting of allergic dermatitis, summer eczema, urticaria, heaves, inflammatory airway disease, recurrent airway obstruction, airway hyper-responsiveness, allergic asthma, eosinophilic asthma, and neutrophilic asthma, rhinitis, chronic obstruction pulmonary disease and inflammatory process resulting from autoimmunity.

[0195] Most preferably, the vaccine compositions described herein comprise at least two self-protein segments, in particular at least three self-protein segments, derived from canine IL-33 and are used to prevent or treat atopic dermatitis and/or allergic rhinitis.

[0196] “Treatment”, “treating”, and the like refer to therapeutic treatment. The terms “prevention” and “preventing” refer to prophylactic or preventative measures. Animals in need of treatment or prevention include those already with the disorder or disease condition as well as those in which the disorder or disease condition is to be prevented. The terms “treating” or “preventing” of a disease or disorder includes preventing or protecting against the disease or disorder (that is, causing the clinical symptoms not to develop), inhibiting the disease or disorder (i.e., arresting or suppressing the development of clinical symptoms), and/or relieving the disease or disorder (i.e., causing the regression of clinical symptoms). It is not always possible to distinguish between “preventing” and “suppressing” a disease or disorder since the ultimate inductive event or events may be unknown or latent. Accordingly, the term “prophylaxis” can also be understood to constitute a type of “treatment” that encompasses both “preventing” and “suppressing.” The term “treatment” can thus include “prophylaxis”.

[0197] A variety of administration routes are available for administering the vaccine compositions of the invention. The particular mode selected will depend upon the particular subject group selected, the age and general health status of the subject, the particular condition being treated and the dosage required for therapeutic and/or prophylactic efficacy. The methods of this invention may be practiced using any mode of administration that produces effective levels of an immune response without causing clinically unacceptable adverse effects.

[0198] The treatment comprises administering an effective amount of the vaccine composition described herein may to a subject in need thereof. The effective amount is sufficient to elicit an immune response characterized by the production of autoantibodies against the targeted self-protein of the recipient subject. Such effective amount is any amount that causes an immune response comprising the production of autoantibodies in the recipient subject. A method of measuring the strength and quality of the immune response elicited by the vaccine composition of the invention, including the production of autoantibodies, is also part of the invention (see below). A skilled person knows that the effective amount depends on host factors such as the animal species, age, weight, stage of disease, as well as other factors known in the art. The term “suitable effective amount of the vaccine composition” refers to the sum in μg of the polyprotein in the form of protein, DNA or RNA, the immunostimulatory oligonucleotides and optionally the adjuvant conferring a depot effect contained in the vaccine composition of the invention.

[0199] Suitable effective amounts may range from about 0.1 μg to 5000 μg per subject. In some embodiments, the effective amount may range from about 0.5 μg to about 4500 μg, from about from about 0.5 μg to about 4500 μg, from about 0.5 μg to about 4500 μg, from about 1 μg to about 4000 μg, from about 1 μg to about 3500 μg, from about 1 μg to about 3000 μg, from about 1 μg to about 2500 μg, from about 1 μg to about 2000 μg, from about 1 μg to about 1500 μg, from about 1 μg to about 1000 μg, from about 1 μg to about 900 μg, from about 1 μg to about 800 μg, from about 1 μg to about 700 μg, from about 1 μg to about 600 μg, from about 1 μg to about 500 μg, from about 1 μg to about 400 μg, from about 1 μg to about 300 μg.

[0200] In some embodiments, an immune response can be elicited in a human by administering an effective amount of any of the vaccine compositions described herein to the human subject. The effective amount is sufficient to elicit an immune response comprising the production of autoantibodies against the targeted self-protein in the recipient subject. For example, the effective amount of the vaccine composition for a human can be from about 0.1 μg to about 5000 μg per subject, from about 0.5 μg to about 5000 μg per subject, from about 1 μg to about 4500 μg per subject, from about 1 μg to about 4000 μg per subject, or from about 1 μg to about 3500 μg per subject. By way of example, suitable effective amounts for a human subject may be about 5000 μg, about 4750 μg, about 4500 μg, about 4250 μg, about 4000 μg, about 3750 μg, about 3500 μg, about 3250 μg, about 3000 μg, about 2750 μg, about 2500 μg, about 2250 μg, about 2000 μg, about 1750 μg, about 1500 μg, 1250 μg, about 1000 μg, about 500 μg, about 100 μg, about 75 μg, about 50 μg, about 25 μg, about 10 μg, about 1 μg or about 0.1 μg.

[0201] In some embodiments, an immune response can be elicited in a non-human animal, in particular in a dog, by administering an effective amount of any of the vaccine compositions described herein to the non-human subject. The effective amount is sufficient to elicit an immune response comprising the production of autoantibodies in the recipient subject, in particular a dog. For example, the effective amount of the vaccine composition for a non-human animal, in particular a dog, can be from about 0.1 μg to about 5000 μg per subject, from about 0.5 μg to about 5000 μg per subject, from about 1 μg to about 4500 μg per subject, from about 1 μg to about 4000 μg per subject, or from about 1 μg to about 3500 μg per subject. By way of example, suitable effective amounts for a non-human subject may be about 5000 μg, about 4750 μg, about 4500 μg, about 4250 μg, about 4000 μg, about 3750 μg, about 3500 μg, about 3250 μg, about 3000 μg, about 2750 μg, about 2500 μg, about 2250 μg, about 2000 μg, about 1750 μg, about 1500 μg, 1250 μg, about 1000 μg, about 500 μg, about 100 μg, about 75 μg, about 50 μg, about 25 μg, about 10 μg, about 1 μg, 0.5 μg or about 0.1 μg.

[0202] The use of the term “about” in connection with numerical values herein indicates that the numerical values may be affected by measurement errors which typically change the numerical values by not more than +5%. Numerical values disclosed herein together with the term “about” are also meant to be disclosed as such, i.e. without the term “about”. Further, numerical ranges as stated herein are meant to include and disclose each and every value within that range. All upper and lower end points of ranges for the same parameter disclosed herein are combinable with each other. All ranges for different parameters disclosed herein are combinable with each other. In particular, the ranges of different or the same “preference level” are particularly compatible with each other.

[0203] The vaccine composition may be administered intravenously, intramuscularly, intradermally, intraperitoneally, subcutaneously, by spray, in ovo by feather follicle method, orally, intraocularly, intratracheally, intranasally, or by other methods known in the art. The vaccine composition can be administered subcutaneously. The vaccine composition can also be administered intramuscularly. The vaccine composition may also be administered orally.

[0204] The methods of the invention elicit an immune response in a subject such that a disease in a subject is prevented or treated.

[0205] Administration can be achieved in various ways. For instance, injection via a needle (e.g. a hypodermic needle) can be used, particularly for intramuscular, subcutaneous, intraocular, intraperitoneal or intravenous administration. Needle-free injection can be used as an alternative.

### Enzyme-Linked Immunosorbent Assay

[0206] The vaccine composition, polyprotein and uses of the invention are supplemented by an assay that the inventors developed to specifically detect the autoantibodies produced upon using the polyprotein or the vaccine composition of the invention in a host. This assay method is an enzyme-linked immunosorbent assay (ELISA) and comprises the steps of
[0207] a) Adsorbing an antigen onto a test surface;
[0208] b) Blocking of free binding sites on the test surface;
[0209] c) Incubating the antigen-coated and blocked test surface with a mixture comprising a labeled antibody against the antigen and a to-be-tested autoantibody against the antigen; and
[0210] d) Detecting the binding of the labeled antibody.

[0211] Detection of autoantibodies, in particular autoantibodies to cytokines, is typically fraught with difficulties, which are, however, overcome by the assay of the invention. For example, prior art assays often delivered false positive test results because of the nonspecific and low-affinity binding occurring between intact IgG molecules and (recombinant) antigens attached to plastic or nitrocellulose membranes. The use of glycosylated antigens such as cytokines produced in eukaryotic cells for detection may also lead to false positive results because of antipolysaccharide antibodies in the tested serum. Surprisingly, the assay of the invention seems to overcome these difficulties because of its reliance on the competition of a labeled known antibody against the targeted host protein of interest with the to-be-tested autoantibody. This competition principle of the assay minimizes false-positive results.

[0212] In step a) of the assay according to the invention, an antigen is adsorbed to a test surface. The term “adsorbing” as used herein means “incubating a test surface with an antigen so that the antigen is adhered to the test surface”. “Adhered to” in this context is meant in the sense of “bound to” or “attached to”. The test surface can be any surface typically used for ELISA formats such as the surface of a well plate, in particular the surface of a plastic well plate, preferably a polystyrene well plate.

[0213] The “antigen” as used herein refers a molecule or a portion of a molecule capable of being bound by an antibody which is additionally capable of inducing a host to produce an antibody capable of binding to an epitope of that antigen. An antigen may have one or more than one epitope. Preferably, the antigen used in step a) is or comprises the polyprotein of the invention, a single protein segment thereof or the targeted self-protein that the protein segments in the polyprotein of the invention are derived from.

[0214] In step b) of the assay according to the invention, free binding sites on the test surface are blocked. This prevents unspecific binding of the labeled antibody and the to-be-tested autoantibody to the test surface. Suitable solutions, so-called blocking solutions, to achieve step b) are known to the skilled person from other typical ELISA formats. A blocking solution always contains a blocking agent. The blocking agent can be a protein or a mixture of proteins. In particular, the blocking agent can be bovine serum albumin (BSA), newborn calf serum (NBCS), casein, non-fat dry milk or gelatin. Preferably, the blocking agent is gelatin. When using gelatin in the assay of the invention as blocking agent, experiments of the inventors have shown that the background signal is particularly low.

[0215] Step c) of the assay according to the invention reflects the assay's competition principle. Step c) involves the competition of a labeled antibody with a to-be-tested autoantibody for binding to the test-surface-adsorbed antigen of step a). Preferably, the labeled antibody is a labeled neutralizing antibody. Since for the assay a labeled antibody against the antigen of interest is used, this antibody can only be displaced or outperformed if the to-be-tested autoantibody has at least a similarly high binding affinity to the employed antigen as the labeled antibody. The mixture used in step c) comprising the labeled antibody and the to-be-tested autoantibody contains a defined amount of labeled antibody. The term “defined amount” in this context means, that the skilled person knows the amount or concentration of the labeled antibody that was employed in the assay. Preferably, 25 to 200 ng/ml of labeled antibody, more preferably 50 to 150 ng/ml labeled antibody and most preferably 75 to 125 ng/ml labeled antibody are used in the mixture of step c). Experiments of the inventors have shown that upon using such concentrations of the labeled antibody in the assay of the invention, the competition with the to-be-tested autoantibody can be particularly well detected.

[0216] Preferably, the competition between the two antibodies of step c) is tested by providing a series of mixtures wherein the mixtures of the series differ in the dilution of the to-be-tested autoantibody. The to-be-tested autoantibody can be used in dilutions of 1:1 to 1:20.000, preferably of 1:1 to 1:15.000 and most preferably of 1:1 to 1:10.000.

[0217] The term “labeled antibody” is meant to include both intact immunoglobulin molecules as well as portions, fragments, peptides and derivatives thereof such as, for example, Fab, Fab′, F(ab′)2, Fv, Fse, CDR regions, paratopes, or any portion or peptide sequence of the antibody that is capable of binding the antigen of step a). A labeled antibody is said to be “capable of binding” an antigen of step a) if it is capable of specifically reacting with the antigen molecule to thereby bind the antigen molecule to the antibody.

[0218] Labeled antibodies also include chimeric antibodies or heterochimeric antibodies as well as fragments, portions, regions, peptides or derivatives thereof, provided by any known technique, such as, but not limited to, enzymatic cleavage, peptide synthesis, or recombinant techniques.

[0219] Step d) of the assay of the invention concerns the detection of the antigen-bound labeled antibody. The detection of the labeled antibody is based on its label. The amount of antigen-bound labeled antibody ultimately depends on how effective the to-be-tested autoantibody outperformed the labeled antibody in the binding to the test surface-bound antigen.

[0220] Suitable labels of an antibody are known to the skilled person. For example, the skilled person could use as label radioactive isotopes such as ¹⁴C or a tag such as biotin. Preferably, biotin is used as the label. Biotin as label has the advantage that it can be attached directly to an existing protein.

[0221] A radiolabeled antibody can be directly detected by measuring the radioactivity, e.g., with a radiometric detector or using a scintillation cocktail and a scintillation counter.

[0222] Labels of the antibody in form of a tag can be detected with a suitable label-binding moiety coupled to a reporter. A suitable label-binding moiety for biotin can be for example avidin or streptavidin. The matching system of biotin-strepavidin or biotin-avidin has the advantage that the binding of the two matching partners is particularly specific and strong.

[0223] A suitable reporter coupled to the label-binding moiety could be an enzyme such as alkaline phosphatase or horse-radish peroxidase or a fluorescent tag such as GFP. While fluorescent tags can be directly detected by measuring their fluorescence, reporter enzymes can be used to catalyze reactions that lead to a measurable colored product.

[0224] A suitable colorimetric substrate for alkaline phosphatase is for example 4-nitrophenyl phosphate disodium salt hexahydrate (pNPP). Upon dephosphorylation of pNPP, a water soluble yellow product is obtained which has a strong absorption at 405 nm. Absorption at 405 nm can be measure with an ELISA reader, for example the Epoch Reader (150115E) or the Synergy H1 Reder (180427C). Other suitable colorimetric substrates for alkaline phosphatase are 5-bromo-4-chloro-3-indolyl phosphate (BCIP) and nitroblue tetrazolium (NBT) produce a purple colored precipitate.

[0225] Suitable colorimetric substrate for horse-radish peroxidase are for example 3,3′,5,5′ tetramethylbenzidine (TMB) and 2,2′-azino-di[3-ethylbenzthiazoline]sulfonate (ABTS).

[0226] The assay of the invention can contain additional steps in between steps a) to d) such as washing steps to remove any antibody material that has not bound to the test-surface adsorbed antigen.

[0227] Experiments of the inventors showed that the assay of the invention is particularly well-suited to detect autoantibodies against IL-31, in particular canine IL-31. In this case, a polyprotein as described above containing (canine) IL-31 or a (canine) IL-31 protein segment of this polyprotein is used as antigen and as labeled antibody a labeled antibody which perturbs or even neutralizes the function of (canine) IL-31 is used.

[0228] Preferably, a labeled antibody against canine IL-31 comprising at least one of the groups consisting of
[0229] a variable heavy (V_{H}) chain complementary determining region (CDR) 1 having the amino acid sequence YYDIN (SEQ ID NO: 8), SYDMS (SEQ ID NO: 9), or NYGMS (SEQ ID NO: 10);
[0230] a variable heavy chain CDR2 having the amino acid sequence WIFPGDGGTKYNETFKG (SEQ ID NO: 11), TITSGGGYTYSADSVKG (SEQ ID NO: 12), or TISYGGSYTYYPDNIKG (SEQ ID NO: 13); and
[0231] a variable heavy chain CDR3 having the amino acid sequence ARGGTSVIRDAMDY (SEQ ID NO: 14), ARQNWVVGLAY (SEQ ID NO: 15), or VRGYGYDTMDY (SEQ ID NO: 16)
   is used in the assay of the invention.

[0232] Still preferably, a labeled antibody against canine IL-31 comprising at least one of the groups consisting of
[0233] a variable light (V_{L}) chain comprising a complementary determining region (CDR) 1 having the amino acid sequence RASESVDNYGISFMH (SEQ ID NO: 17),
[0234] KSSQSLLNSGNQKNYLA (SEQ ID NO: 18), or KASQSVSFAGTGLMH (SEQ ID NO: 19);
[0235] a variable light chain CDR2 having the amino acid sequence RASNLES (SEQ ID NO: 20), GASTRES (SEQ ID NO: 21), or RASNLEA (SEQ ID NO: 22); and
[0236] a variable light chain CDR3 having the amino acid sequence QQSNKDPLT (SEQ ID NO: 23), QNDYSYPYT (SEQ ID NO: 24), or QQSREYPWT (SEQ ID NO: 25).
   is used in the assay of the invention.

[0237] More preferably, a labeled antibody against canine IL-31 comprising at least one of the groups consisting of
[0238] a) a variable light chain comprising (SEQ ID NO: 26), (SEQ ID NO: 27), (SEQ ID NO: 28), (SEQ ID NO: 29), (SEQ ID NO: 30), (SEQ ID NO: 31), or (SEQ ID NO: 32);
[0239] b) a variable heavy chain comprising (SEQ ID NO: 33), (SEQ ID NO: 34), (SEQ ID NO: 35), (SEQ ID NO: 36), (SEQ ID NO: 37), or (SEQ ID NO: 38) is used in the assay of the invention.

[0240] Such labeled neutralizing antibodies bind very efficiently to canine IL-31 (see WO2013/011407 A1). The commercial antibody lokivetmab is particularly suitable for use in the assay method according to the invention to detect neutralizing autoantibodies against canine IL-31.

### Sequence Listing

[0241] This application contains a Sequence Listing which has been submitted electronically and is hereby incorporated by reference in its entirety. Said Sequence Listing file is named 210741WO_ST25_Sequence listing_.txt and 973 KB in size.

[0242] SEQ ID NO: 1 is the amino acid sequence of the Tetanus Toxin T-cell epitope p2.

[0243] SEQ ID NO: 39 is the amino acid sequence of the Tetanus Toxin T-cell epitope p4.

[0244] SEQ ID NO: 2 is the amino acid sequence of the Tetanus Toxin T-cell epitope p30.

[0245] SEQ ID NO: 3 is the amino acid sequence of canine IL-31.

[0246] SEQ ID NO: 4 is one version of the amino acid sequence of the cIL-31 polyprotein used for the vaccine of Example 13a.

[0247] SEQ ID NO: 40 is another version of the amino acid sequence of the cIL-31 polyprotein used for the vaccine of Example 13a.

[0248] SEQ ID NO: 40 differs from SEQ ID NO: 4 only in its N-terminus. In comparison to SEQ ID NO: 4 SEQ ID NO: 40 has three additional amino acids (“SHM”) at the N-terminus. The different N-termini of the polyproteins encoded by SEQ ID NO: 4 and SEQ ID NO: 40 result from different cleavage events of the N-terminal ER-signal sequence.

[0249] SEQ ID NO: 5 is the nucleic acid sequence of the immunostimulatory oligonucleotide 1668-PTO.

[0250] SEQ ID NO: 6 is the nucleic acid sequence of the immunostimulatory oligonucleotide 2006-PTO:

[0251] SEQ ID NO: 7 is the nucleic acid sequence of the plasmid pcDNA3.4-cIL31-poly encoding the cIL-31 polyprotein construct of Example 1a.

[0252] The following sequences concern the amino acid sequences related to the anti-canine IL-31 labeled neutralizing antibody suitable for the assay method according to the invention: SEQ ID NO: 8, SEQ ID NO: 9, SEQ ID NO: 10, SEQ ID NO: 11, SEQ ID NO: 12, SEQ ID NO: 13, SEQ ID NO: 14, SEQ ID NO: 15, SEQ ID NO: 16, SEQ ID NO: 17, SEQ ID NO: 18, SEQ ID NO: 19, SEQ ID NO: 20, SEQ ID NO: 21, SEQ ID NO: 22, SEQ ID NO: 23, SEQ ID NO: 24, SEQ ID NO: 25, SEQ ID NO: 26, SEQ ID NO: 27, SEQ ID NO: 28, SEQ ID NO: 29, SEQ ID NO: 30, SEQ ID NO: 31, SEQ ID NO: 32, SEQ ID NO: 33, SEQ ID NO: 34, SEQ ID NO: 35, SEQ ID NO: 36, SEQ ID NO: 37 and SEQ ID NO: 38.

[0253] SEQ ID NO: 41 is the amino acid sequence of canine IL-5.

[0254] SEQ ID NO: 42 is the amino acid sequence of the cIL-5 polyprotein used for the vaccine construct of Example 13b.

[0255] SEQ ID NO: 43 is an alternative amino acid sequence of the cIL-5 polyprotein that can be used for the vaccine construct of Example 13b.

[0256] SEQ ID NO: 44 is the nucleic acid sequence of the plasmid pcDNA3.4-cIL-5-poly encoding the cIL-5 polyprotein construct of Example 1b.

[0257] SEQ ID NO: 45 is the nucleic acid sequence of the plasmid pcDNA3.4-cIL-5 encoding the cIL-5 protein construct of Example 3b.

[0258] SEQ ID NO: 46 is the amino acid sequence of canine IL-13.

[0259] SEQ ID NO: 47 is the amino acid sequence of the cIL-13 polyprotein used for the vaccine construct of Example 13c.

[0260] SEQ ID NO: 48 is the nucleic acid sequence of the plasmid pcDNA3.4-cIL-13-poly encoding the cIL-13 polyprotein construct of Example 1c.

[0261] SEQ ID NO: 49 is the nucleic acid sequence of the bacterial expression plasmid pET30a-cIL-13 encoding the cIL-13 protein construct of Example 3c.

[0262] SEQ ID NO: 50 is the amino acid sequence of amino acids 110-263 of the full length dog IL-33 protein (Uniprot 097863) canine IL-33-WT.

[0263] SEQ ID NO: 51 is the altered amino acid sequence of canine IL-33-CS, which is amino acids 110-263 of the full length dog IL-33 protein (Uniprot 097863), where the 3 cysteine residues are replaced by serine (IL-33-CS) to improve stability of the gene product.

[0264] SEQ ID NO: 52 is the nucleic acid sequence of the plasmid pET30a (+)-canIL33-WT encoding the cIL-33_WT protein construct of Example 3d.

[0265] SEQ ID NO: 53 is the nucleic acid sequence of the plasmid pET30a (+)-canIL33-CS encoding the cIL-33_CS protein construct construct of Example 3e.

[0266] SEQ ID NO: 54 is the amino acid sequence of the cIL-33-CS polyprotein used for the vaccine construct of Example 13d.

[0267] SEQ ID NO: 55 is the nucleic acid sequence of the plasmid pET30a-cIL33-(CS−)poly encoding the cIL-33-CS polyprotein construct of Example 1d.

[0268] SEQ ID NO: 56 is the amino acid sequence of canine IL-4

[0269] SEQ ID NO: 57 is the amino acid sequence of the cIL-4 polyprotein used for the vaccine construct of Example 13e.

[0270] SEQ ID NO: 58 is the nucleic acid sequence of the plasmid pcDNA3.4-cIL-5-poly encoding the cIL-4 polyprotein construct of Example 1e.

[0271] SEQ ID NO: 59 is the nucleic acid sequence of the bacterial expression plasmid pET30a-cIL-4 encoding the cIL-4 protein construct of Example 3f.

[0272] SEQ ID NO: 60 is the amino acid sequence of feline IL-31.

[0273] SEQ ID NO: 61 is the amino acid sequence of the feline IL-31 polyprotein used for the vaccine construct of Example 13f.

[0274] SEQ ID NO: 62 is the nucleic acid sequence of the plasmid pcDNA3.4-felIL31-poly encoding the feline IL-31 polyprotein construct of Example 1g.

[0275] SEQ ID NO: 63 is the nucleic acid sequence of the plasmid pcDNA3.4-fel-IL31 encoding the feline IL-31 protein construct of Example 3g.

[0276] SEQ ID NO: 64 is the amino acid sequence of bovine TNF-alpha.

[0277] SEQ ID NO: 65 is the amino acid sequence of the bovine TNF-alpha polyprotein used for the immunization of Example 6f.

[0278] SEQ ID NO: 66 is the nucleic acid sequence of the bacterial expression plasmid pET30a-bov-TNF-alpha-poly encoding the bovine TNF-alpha polyprotein construct of Example 1h.

[0279] SEQ ID NO: 67 is the amino acid sequence of the artificial ER import signal used for mammalian expression in the given examples.

[0280] SEQ ID NOs: 68 to 201 are the amino acid sequences of the protein described in the sequence listing.

[0281] SEQ ID NOs: 202 to 329 are the amino acid sequences of polyprotein embodiments particularly useful in the vaccine constructs of Example 13g.

### EXAMPLES

### Example 1a: Design of an IL-31 Polyprotein According to the Invention

[0282] A DNA construct was designed encoding for a polyprotein comprising three copies of mature canine IL-31 proteins wherein the mature canine IL-31 (cIL-31) proteins are separated from each other by a Tetanus toxin T-cell epitope and wherein the C-terminal mature cIL-31 is followed by two additional Tetanus toxin T-cell epitopes (see FIG. 1). The encoded polyprotein further contains an artificial ER import signal at the N-terminus and a His₆-tag at the C-terminus (see FIG. 1). This DNA construct was further designed to contain a Kozak sequence upstream of the start codon of the polyprotein to improve expression in mammalian cells and to contain flanking unique restriction enzyme sites for straightforward cloning. After synthesizing this DNA construct, the DNA construct was cloned into the pcDNA3.4 mammalian expression vector, resulting in the vector pcDNA3.4-cIL31-poly with 7637 bp in size (SEQ ID NO: 7 and plasmid map in FIG. 2). Large amounts of transfection grade plasmid was prepared for Expi293F cell expression.

### Example 1b: Design of an IL-5 Polyprotein According to the Invention

[0283] A DNA construct was designed encoding for a polyprotein comprising three copies of mature canine IL-5 proteins (see FIG. 39) in the same manner as for the canine IL-31 polyprotein in Example 1a. The DNA construct encoding for cIL-5-polyprotein was sub-cloned into the pcDNA3.4 mammalian expression vector, resulting in the vector pcDNA3.4-cIL-5-poly with 7430 bp in size (SEQ ID NO: 44 and plasmid map in FIG. 40). Large amounts of transfection grade plasmid was prepared for Expi293F cell expression.

### Example 1c: Design of an IL-13 Polyprotein According to the Invention

[0284] A DNA construct was designed encoding for a polyprotein comprising three copies of mature canine IL-13 proteins (see FIG. 47) in the same manner as for the canine IL-31 polyprotein in Example 1a. The DNA construct encoding for cIL-13-polyprotein was sub-cloned into the pcDNA3.4 mammalian expression vector, resulting in the vector pcDNA3.4-cIL-13-poly with 7418 bp in size (SEQ ID NO: 48 and plasmid map in FIG. 48). Large amounts of transfection grade plasmid was prepared for Expi293F cell expression.

### Example 1d: Design of an IL-33-CS Polyprotein According to the Invention

[0285] A DNA construct was designed encoding for a cIL-33-CS polyprotein (polyprotein-SEQ ID NO: 54) comprising three copies of mature canine IL-33-CS proteins wherein the mature canine IL-33-CS (cIL-33) proteins are separated from each other by a Tetanus toxin T-cell epitope and wherein the C-terminal mature cIL-33-CS is followed by two additional Tetanus toxin T-cell epitopes (see FIG. 63). The polyprotein further contains an artificial start methionine and the His₆ tag, as shown in FIG. 63.

[0286] Based on this polypeptide sequence, the DNA encoding for Hi6-cIL33-CS-poly (SEQ ID NO: 55) was designed and synthesized, including a start ATG codon to improve expression in Escherichia coli, and flanking unique restriction enzyme sites (Ndel and HindIII) for straightforward subcloning into the bacterial expression vector pET30a.

[0287] The DNA construct was sub-cloned into the pET30a bacterial expression vector, resulting in the vector pET30a-cIL-33-poly (i.e. pET30a-cIL-33-CS poly) with 6954 bp in size (plasmid map in FIG. 64).

[0288] The inventors constructed the cIL-33 poly-form with cIL-33-CS as the base protein instead of cIL-33-WT. The inventors found that while human IL-33-WT is known to be sensitively recognized by HEK-Blue™ IL-33 cells, canine IL-33-WT was sensitively recognized only after the free cysteines were mutated to serines, as in cIL-33-CS (see Example 12c below). Without being bound to a theory, it seems that the mutation overcame a potential structural liability of the free cysteines that could be disadvantageous in a cIL-33-poly construct. While this mutation of the free cysteines is not required for all IL-33 constructs, it is advantageous and is a preferred embodiment of the invention.

### Example 1e: Design of an IL-4 Polyprotein According to the Invention

[0289] A DNA construct was designed encoding for a polyprotein comprising three copies of mature canine IL-4 protein (see FIG. 68) in the same manner as for the canine IL-31 polyprotein in Example 1a. The DNA construct encoding for cIL-4-polyprotein was sub-cloned into the pcDNA3.4 mammalian expression vector, resulting in the vector pcDNA3.4-cIL-4-poly with 7373 bp in size (SEQ ID NO: 58 and plasmid map in FIG. 69). Large amounts of transfection grade plasmid was prepared for Expi293F cell expression.

### Example 1f: Design of a Feline IL-31 Polyprotein According to the Invention

[0290] A DNA construct (SEQ ID NO: 62) was designed encoding for a polyprotein (SEQ ID NO: 61) comprising three copies of mature feline (Felis catus; Felis silvestris catus) IL-31 proteins (SEQ ID NO: 60) wherein the mature feline IL-31 (fel-IL-31) proteins are separated from each other by a Tetanus toxin T-cell epitope and wherein the C-terminal mature fel-IL-31 is followed by two additional Tetanus toxin T-cell epitopes (see FIG. 74). The encoded polyprotein further contains an artificial ER import signal at the N-terminus and a His₆-tag at the C-terminus (see FIG. 74). This DNA construct was further designed to contain a Kozak sequence upstream of the start codon of the polyprotein to improve expression in mammalian cells and to contain flanking unique restriction enzyme sites for straightforward cloning. After synthesizing this DNA construct, the DNA construct was sub-cloned into the pcDNA3.4 mammalian expression vector resulting in the expression plasmid pcDNA3.4-felIL31-poly (7597 bp). Large amounts of transfection grade plasmid was prepared for Expi293F cell expression.

### Example 1g: Design of a Further Polyprotein Embodiments According to the Invention

[0291] DNA constructs can be designed to encode for other polyproteins. This could be achieved as follows:

[0292] A polyprotein is designed to comprise three copies of a self-protein having one of the sequences SEQ ID NOs: 68-201, wherein the three copies are separated from each other by a Tetanus toxin T-cell epitope (e.g. p2, p4, or p30) and wherein the C-terminal mature protein is followed by two additional Tetanus toxin T-cell epitopes in the same manner as for Example 1a in FIG. 1). The encoded polyprotein can be designed to contain an artificial ER import signal at the N-terminus and a His₆-tag at the C-terminus.

[0293] This DNA construct can be further designed to contain a Kozak sequence upstream of the start codon of the polyprotein to improve expression in mammalian cells and to contain flanking unique restriction enzyme sites for straightforward cloning. After synthesizing this DNA construct, the DNA construct can be sub-cloned into the pcDNA3.4 mammalian expression vector to prepare large amounts of transfection grade plasmid for Expi293F cell expression.

[0294] Alternatively, the DNA construct can be designed to improve expression in bacteria, e.g. by including a start ATG codon to improve expression in Escherichia coli, and flanking unique restriction enzyme sites (Ndel and HindIII) for straightforward subcloning into the bacterial expression vector pET30a, resulting in the vector pET30a-[poly]-poly.

### Example 1h: Design of a Bovine TNF-Alpha Polyprotein According to the Invention

[0295] A DNA construct (SEQ ID NO: 66) was designed encoding for a bovine TNF-alpha polyprotein (polyprotein-SEQ ID NO: 65) comprising three copies of TNF-alpha (SEQ ID NO: 65) proteins wherein the TNF-alpha proteins are separated from each other by a Tetanus toxin T-cell epitope and wherein the C-terminal TNF-alpha is followed by two additional Tetanus toxin T-cell epitopes (see FIG. 77). The polyprotein further contains an artificial start methionine and the His₆ tag, as shown in FIG. 77. Hexa-G/S-linkers were used in this construct.

[0296] Based on this polypeptide sequence, the DNA encoding for Hi6-bov-TNF-alpha-poly (SEQ ID NO: 66) was designed and synthesized, including a start ATG codon to improve expression in Escherichia coli, and flanking unique restriction enzyme sites (Ndel and HindIII) for straightforward subcloning into the bacterial expression vector pET30a.

[0297] The DNA construct was sub-cloned into the pET30a bacterial expression vector, resulting in the vector pET30a (+)-bov-TNF-alpha-poly with 7017 bp in size (plasmid map in FIG. 78).

### Example 2a: Expression of a cIL-31 Polyprotein According to the Invention in Expi293F Cells and Purification of the Expressed Polyprotein

[0298] Expi293F cells were grown in serum-free Expi293™ expression Medium (Thermo Fisher Scientific). The Expi293F cells were maintained in Erlenmeyer Flasks (Corning Inc.) at 37° C. with 8% CO₂ on an orbital shaker (VWR Scientific). One day before transfection, the cells were seeded at an appropriate density in Corning Erlenmeyer Flasks. On the day of transfection, the plasmid pcDNA3.4-cIL31-poly and transfection reagent were mixed at an optimal ratio and then added into the flask with cells ready for transfection. The cell culture supernatants collected on day 6 were used for purification of the polyprotein expressed from pcDNA3.4-cIL31-poly (SEQ ID NO: 7 and plasmid map in FIG. 2). The produced mature polyprotein is expected to no longer include the artificial ER import signal at the N-terminus and then has the sequence of SEQ ID NO: 4 or SEQ ID NO: 40. SEQ ID NO: 4 and SEQ ID NO: 40 differ from each other in their N-terminus due to different cleavage events of the ER import signal.

[0299] The purification and analysis of the expressed polyprotein were performed as follows:

[0300] The cell culture broth was centrifuged. Thereafter, the cell culture supernatant was loaded onto an Ni²⁺-NTA affinity purification column at an appropriate flowrate. After washing and elution with appropriate buffers, the eluted fractions were pooled and the buffer was exchanged to the final formulation buffer which was PBS, pH 7.2.

[0301] The purified polyprotein was analyzed by SDS-PAGE and Coomassie Blue staining to determine its molecular weight and purity. To do so, the concentration of the purified polyprotein was determined by the Bradford assay with BSA as a standard for the calibration curve. Approximately 16 mg of (in phosphate-buffered saline, PBS) soluble (cIL-31)-p4-(cIL-31)-p30-(cIL-31)-p30-p4-His₆ polyprotein, referred to in the following Examples as cIL-31 polyprotein or cIL-31 poly, were obtained from 100 ml crude cell culture supernatant.

[0302] For the SDS-PAGE analysis the following loading buffers were used:
[0303] Reducing Loading buffer: 300 mM Tris-HCl, 10% SDS, 30% Glycerol, 0.5% bromophenol blue, 250 mM DTT, pH 6.8.
[0304] Non-Reducing Loading buffer: 300 mM Tris-HCl, 10% SDS, 30% Glycerol, 0.5% bromophenol blue, pH 6.8.

[0305] Reducing and non-reducing loading buffer were added to the polyprotein samples, respectively. The polyprotein samples with reducing or non-reducing loading buffer had a concentration close to 0.5 mg/ml.

[0306] After mixing the polyprotein samples with reducing loading buffer, heating at 100° C. for 5-10 min was performed.

[0307] The polyprotein samples with reducing or non-reducing loading buffer were centrifuged at 10000 rpm for 1 min, and then loaded in a gel chamber of a precast gel (Genscript, Cat. No. M42012). SDS-PAGE with these gels was performed as outlined by the manufacturer (140 V for approximately 60 min). Thereafter, the gel was stained with Coomassie Blue. The stained gel is shown in FIG. 3.

[0308] The dominant band in lane 1 of the Coomassie Blue-stained gel in FIG. 3 is slightly larger than expected from the protein sequence (56865.04 Da, calculated from the mature sequence using https://web.expasy.org/cgi-bin/protparam/protparam). This difference likely arises from extensive N-glycosylation since the cIL-31 protein sequence contains 8 N-glycosylation sites, of which 7, based on NetNGlyc analysis (http://www.cbs.dtu.dk/services/NetNGlyc/), are likely to be modified.

[0309] Under non-reducing conditions (lane 2 of the Coomassie Blue-stained gel in FIG. 3), only approximately half of the loaded protein migrated in a band which is indicative of a monomer. A large proportion appears to be in dimeric and multimeric forms.

### Example 2b: Expression of a cIL-5 Polyprotein According to the Invention in Expi293F Cells and Purification of the Expressed Polyprotein

[0310] Expression of a cIL-5 polyprotein was conducted the same as for the expression of the cIL-31 polyprotein of Example 2a, except that plasmid pcDNA3.4-cIL-5-poly (SEQ ID NO: 44; see plasmid map in FIG. 40) instead of pcDNA3.4-cIL31-poly (SEQ ID NO: 7) was used.

[0311] As in Example 2a, the produced mature polyprotein is expected to no longer include the artificial ER import signal at the N-terminus and then has the sequence of SEQ ID NO: 42.

[0312] Approximately 0.23 mg of (in phosphate-buffered saline, PBS) soluble (cIL-5)-p2-(cIL-5)-p30-(cIL-5)-p30-p2-His₆ polyprotein, referred to in the following Examples as cIL-5 polyprotein or cIL-5 poly, were obtained from 100 ml crude cell culture supernatant.

[0313] The stained gel is shown in FIG. 41.

[0314] The dominant band in lane 1 of the SDS-PAGE/Western Blot in FIG. 41 is much larger than expected from the protein sequence (50477.67 Da, calculated from the mature sequence using https://web.expasy.org/cgi-bin/protparam/protparam). This difference likely arises from extensive N-glycosylation, since the protein sequence contains 8 N-glycosylation sites, of which 5, based on NetNGlyc analysis (http://www.cbs.dtu.dk/services/NetNGlyc/), are likely to be modified.

[0315] Under non-reducing conditions (lane 2 of the SDS-PAGE in FIG. 41), the appearance of the loaded protein is changed compared to that under reducing conditions, which is indicative of a disulfide linked oligomeric or polymeric forms.

### Example 2c: Expression of a cIL-13 Polyprotein According to the Invention in Expi293F Cells and Purification of the Expressed Polyprotein

[0316] Expression of a cIL-13 polyprotein was conducted the same as for the expression of the cIL-31 polyprotein of Example 2a, except that plasmid pcDNA3.4-cIL-13-poly (SEQ ID NO: 48; see plasmid map in FIG. 48) instead of pcDNA3.4-cIL31-poly (SEQ ID NO: 7) was used.

[0317] As in Example 2a, the produced mature polyprotein is expected to no longer include the artificial ER import signal at the N-terminus and then has the sequence of SEQ ID NO: 47.

[0318] Approximately 0.6 mg of (in phosphate-buffered saline, PBS) soluble (cIL-13)-p2-(cIL-13)-p30-(cIL-13)-p30-p2-His₆ polyprotein, referred to in the following Examples as cIL-13 polyprotein or cIL-13 poly, were obtained from 100 ml crude cell culture supernatant.

[0319] The stained gel is shown in FIG. 49.

[0320] The dominant band in lane 1 of the SDS-PAGE/Western Blot in FIG. 49 is much larger than expected from the protein sequence (47496.39 Da, calculated from the mature sequence using https://web.expasy.org/cgi-bin/protparam/protparam). This difference likely arises from extensive N-glycosylation, since the protein sequence contains 14 N-glycosylation sites, of which 13, based on NetNGlyc analysis (http://www.cbs.dtu.dk/services/NetNGlyc/), are likely to be modified.

[0321] Under non-reducing conditions (lane 2 of the SDS-PAGE in FIG. 49), the appearance of the loaded protein is very similar to that under reducing conditions, which is indicative of a largely monomeric form.

### Example 2d: Expression of a cIL-33 Polyprotein According to the Invention in E. coli Cells and Purification of the Expressed Polyprotein

[0322] E. coli strain BL21 Star™ (DE3) was transformed with recombinant plasmid. A single colony was inoculated into Lysogeny Broth (LS) medium containing related antibiotic. The culture was incubated at 37° C. at 200 rpm and then induced with Isopropyl β-D-1-thiogalactopyranoside (IPTG). SDS-PAGE was used to monitor the expression.

[0323] Expression was scaled up as follows: Recombinant BL21 (DE3) stored in glycerol was inoculated into Terrific Broth (TB) medium containing related antibiotic and cultured at 37° C. When the OD600 reached about 1.2, the cell culture was induced with IPTG at 15° C. for 16 h. Bacteria were harvested by centrifugation.

[0324] The purification of the expressed protein was performed as follows: Bacterial pellets were resuspended with lysis buffer followed by sonication. The precipitate after centrifugation was dissolved using denaturing agent. Target protein was obtained by one-step purification using a Ni column. Target protein was sterilized by 0.22 μm filter before stored in aliquots. The concentration was determined by Bradford protein assay with BSA as standard. The protein purity and molecular weight were determined by standard SDS-PAGE.

[0325] The SDS-PAGE analysis of the expressed protein was performed as described in Example 2a. The stained gel is shown in FIG. 65.

[0326] Approximately 0.9 mg of soluble (in phosphate-buffered saline, PBS) cIL-13-His₆ was obtained from the bacterial pellet of 1 L culture. The size of the dominant band in lane 2 of the SDS-PAGE depicted in FIG. 65 is in good agreement with the prediction expected from the protein sequence (63604.11 Da, calculated from the mature sequence using https://web.expasy.org/cgi-bin/protparam/protparam).

### Example 2e: Expression of a cIL-4 Polyprotein According to the Invention in Expi293F Cells and Purification of the Expressed Polyprotein

[0327] Expression of a cIL-4 polyprotein was conducted the same as for the expression of the cIL-31 polyprotein of Example 2a, except that plasmid pcDNA3.4-cIL-4-poly (SEQ ID NO: 58; see plasmid map in FIG. 69) instead of pcDNA3.4-cIL31-poly (SEQ ID NO: 7) was used.

[0328] The Western blot analysis revealed the recombinant product as a broad band between 100 kDa and 120 kDa in reduced samples, while in non-reduced samples two fuzzy band zones at 100-120 kDa and >>120 kDa were visible.

[0329] As in Example 2a, the produced mature polyprotein is expected to no longer include the artificial ER import signal at the N-terminus and then has the sequence of SEQ ID NO: 47.

[0330] Approximately 4.5 mg of (in phosphate-buffered saline, PBS) soluble (cIL-4)-p2-(cIL-4)-p30-(cIL-4)-p30-p2-His₆ polyprotein, referred to in the following Examples as cIL-4 polyprotein or cIL-4 poly, were obtained from 100 ml crude cell culture supernatant.

[0331] The stained gel is shown in FIG. 49.

[0332] The dominant band under reducing conditions is much larger than expected from the protein sequence (51039.30 Da), calculated from the mature sequence using https://web.expasy.org/cgi-bin/protparam/protparam). This difference likely arises from extensive N-glycosylation, since the protein sequence contains 20 N-glycosylation sites, of which 17, based on NetNGlyc analysis (http://www.cbs.dtu.dk/services/NetNGlyc/), are likely to be modified.

[0333] The potentially and likely to be heterogeneous, massive glycosylation may explain the broad band appearance of the protein in Western blots, and the larger size than predicted by the amino acid composition.

### Example 2f: Expression of a Fel-IL-31 Polyprotein According to the Invention in Expi293F Cells and Purification of the Expressed Polyprotein

[0334] Expi293F cells were grown in serum-free Expi293™ expression Medium (Thermo Fisher Scientific). The Expi293F cells were maintained in Erlenmeyer Flasks (Corning Inc.) at 37° C. with 8% CO₂ on an orbital shaker (VWR Scientific). One day before transfection, the cells were seeded at an appropriate density in Corning Erlenmeyer Flasks. On the day of transfection, the plasmid pcDNA3.4-fel-IL31-poly and transfection reagent were mixed at an optimal ratio and then added into the flask with cells ready for transfection. The cell culture supernatants collected on day 6 were used for purification of the polyprotein expressed from pcDNA3.4-fel-IL31-poly. The produced mature polyprotein is expected to no longer include the artificial ER import signal at the N-terminus and then has the sequence of SEQ ID NO: 61.

[0335] The purification and analysis of the expressed polyprotein were performed as follows:

[0336] The cell culture broth was centrifuged. Thereafter, the cell culture supernatant was loaded onto an Ni²⁺-NTA affinity purification column at an appropriate flowrate. After washing and elution with appropriate buffers, the eluted fractions were pooled and the buffer was exchanged to the final formulation buffer which was PBS, pH 7.2.

[0337] The purified polyprotein was analyzed by SDS-PAGE and Coomassie Blue staining to determine its molecular weight and purity. To do so, the concentration of the purified polyprotein was determined by the Bradford assay with BSA as a standard for the calibration curve. Approximately 7.29 mg of (in phosphate-buffered saline, PBS) soluble fel-IL-31-poly-His₆ were obtained from 100 ml crude cell culture supernatant.

[0338] For the SDS-PAGE analysis the following loading buffers were used:
[0339] Reducing Loading buffer: 300 mM Tris-HCl, 10% SDS, 30% Glycerol, 0.5% bromophenol blue, 250 mM DTT, pH 6.8.
[0340] Non-Reducing Loading buffer: 300 mM Tris-HCl, 10% SDS, 30% Glycerol, 0.5% bromophenol blue, pH 6.8.

[0341] Reducing and non-reducing loading buffer were added to the polyprotein samples, respectively. The polyprotein samples with reducing or non-reducing loading buffer had a concentration close to 0.5 mg/ml. After mixing the polyprotein samples with reducing loading buffer, heating at 100° C. for 5-10 min was performed. The polyprotein samples with reducing or non-reducing loading buffer were centrifuged at 10000 rpm for 1 min, and then loaded in a gel chamber of a precast gel (Genscript, Cat. No. M42012). SDS-PAGE with these gels was performed as outlined by the manufacturer (140 V for approximately 60 min). Thereafter, the gel was stained with Coomassie Blue.

[0342] In a Coomassie Blue stained SDS-gel, fel-IL-31-poly is represented by a dominant band around 80 kDa in reduced gels. This is larger than expected (calculated molecular weight of the mature polypeptide: 55615.65 Da), which may be caused by N-glycosylation. Based on NetNGlyc analysis (http://www.cbs.dtu.dk/services/NetNGlyc/), up to 6 positions are likely to be modified.

[0343] In the non-reduced gel lane, mobility of the fel-IL-31-poly band is somewhat faster than in the reduced one, which is typical for intra-chain disulfide bonds leading to more compact structure. Some smear on top of the dominant band indicates aggregated material. However, overall the SDS-PAGE analysis suggest that fel-IL-31-poly is largely monomeric.

### Example 2g: Expression and Purification of Further Polyproteins According to the Invention

[0344] Expression of a polyprotein designed in Example 1g can be conducted the same as for the expression of the cIL-31 polyprotein of Example 2a or of Example 2d. The produced mature polyprotein is expected to no longer include an artificial ER import signal at the N-terminus, if included in the construct, and expected to have the corresponding amino acid sequence SEQ ID NO: 202 to 329.

### Example 2h: Expression and Purification of Bovine TNF-Alpha Polyproteins According to the Invention

[0345] Expression of pET30a-bov-TNF-alpha-poly in E. coli strain BL21 (DE3) and purification of the recombinant protein was essentially done as described for other E. coli expressions (see e.g. cIL-33-CS, cIL-13, cIL-33-CS-poly).

[0346] In brief, inclusion bodies were dissolved in denaturing solution and subjected to Ni²⁺-NTA affinity chromatography. The eluate from this column was then subjected to Superdex G200 size exclusion chromatography, and the eluate was stored in PBS, 10% Glycerol, 1 M L-Arginine, pH 7.4. 1 L of culture yielded 5.82 mg of the recombinant protein and SDS PAGE analysis showed that the purity of the bovine TNF-alpha polyprotein exceeds 90%.

### Example 3a: Expression of a Properly Folded Native cIL-31 in Mammalian Cells

[0347] A DNA construct encoding for cIL-31 with an artificial ER import signal at the N-terminus and a His₆-tag at the C-terminus was designed. This cIL-31-DNA construct was further designed to contain a Kozak sequence upstream of the start codon of the protein to improve expression in mammalian cells and to contain flanking unique restriction enzyme sites for straightforward cloning. After synthesizing this DNA construct, the DNA construct was cloned into the pcDNA3.4 mammalian expression vector, resulting in the vector pcDNA3.4-cIL31 with 6521 bp in size. Large amounts of transfection grade plasmid were prepared for Expi293F cell expression.

[0348] Expression of the cIL-31 construct from pcDNA3.4-cIL31 was achieved as follows:

[0349] Expi293F cells were grown in serum-free Expi293™ expression Medium (Thermo Fisher Scientific). The cells were maintained in Erlenmeyer Flasks (Corning Inc.) at 37° C. with 8% CO₂ on an orbital shaker (VWR Scientific). One day before transfection, the cells were seeded at an appropriate density in Corning Erlenmeyer Flasks. On the day of transfection, the plasmid pcDNA3.4-cIL31 and transfection reagent were mixed at an optimal ratio and then added into the flask with cells ready for transfection. The cell culture supernatants collected on day 6 were used for purification.

[0350] The purification and analysis of the expressed protein was performed as follows:

[0351] The cell culture broth was centrifuged. The cell culture supernatant was loaded onto an Ni²⁺-NTA affinity purification column at an appropriate flowrate. After washing and elution with appropriate buffers, the eluted fractions were pooled and buffer exchanged to the final formulation buffer, which was PBS pH 7.2.

[0352] The purified protein was analyzed by SDS-PAGE and Coomassie Blue staining to determine its molecular weight and purity. To do so, the concentration of the purified polyprotein was determined by the Bradford assay with BSA as a standard for the calibration curve. Approximately 2.61 mg of (in phosphate-buffered saline, PBS) soluble cIL31-His₆, referred to in the following examples as cIL-31, were obtained from 100 ml crude cell culture supernatant.

[0353] For the SDS-PAGE analysis the following loading buffers were used:
[0354] Reducing Loading buffer: 300 mM Tris-HCl, 10% SDS, 30% Glycerol, 0.5% bromophenol blue, 250 mM DTT, pH 6.8.
[0355] Non-Reducing Loading buffer: 300 mM Tris-HCl, 10% SDS, 30% Glycerol, 0.5% bromophenol blue, pH 6.8.

[0356] Reducing and non-reducing loading buffer were added to the protein samples, respectively. The protein samples with reducing or non-reducing loading buffer had a concentration close to 0.5 mg/ml.

[0357] After mixing the protein samples with reducing loading buffer, heating at 100° C. for 5-10 min was performed.

[0358] The protein samples with reducing or non-reducing loading buffer were centrifuged at 10000 rpm for 1 min, and then loaded in a gel chamber of a precast gel (Genscript, Cat. No. M42012). SDS-PAGE with these gels was performed as outlined by the manufacturer (140 V for approximately 60 min). Thereafter, the gel was stained with Coomassie Blue. The stained gel is shown in FIG. 4.

[0359] The dominant band in lane 1 of the SDS-PAGE is considerably larger than expected from the protein sequence (16196.54 Da, calculated from the mature sequence using https://web.expasy.org/cgi-bin/protparam/protparam). It is likely that the difference is accounted for by extensive N-glycosylation, since the protein sequence contains two N-glycosylation sites, both of which, based on NetNGlyc analysis (http://www.cbs.dtu.dk/services/NetNGlyc/), are likely to be modified.

[0360] Under non-reducing conditions (lane 2 in SDS-PAGE), the bulk of the loaded protein migrated in a band which is indicative of a monomer. Only a minor proportion appears to be present in dimeric and multimeric forms.

### Example 3b: Expression of a Properly Folded Native cIL-5 in Mammalian Cells

[0361] Design, synthesis and subcloning of a DNA construct encoding for cIL-5 was performed as described for cIL-31 in Example 3a. The vector pcDNA3.4-cIL-5 (SEQ ID NO: 45) with 6452 bp in size is depicted in FIG. 42. Large amounts of transfection grade plasmid were prepared for Expi293F cell expression.

[0362] Expression of the cIL-5 construct from pcDNA3.4-cIL-5, as well as purification and analysis of the expressed protein was achieved as for the cIL-31 construct in Example 3a.

[0363] Approximately 7.28 mg of (in phosphate-buffered saline, PBS) soluble cIL-5-His₆, referred to in the following examples as cIL-5, were obtained from 100 ml crude cell culture supernatant.

[0364] The observed apparent molecular size in reducing SDS-PAGE (FIG. 43, Lane “1”) is slightly higher than expected from prediction (13921.91 Da, calculated from the mature sequence using https://web.expasy.org/cgi-bin/protparam/protparam), which may be accounted for by N-glycosylation at one position. Non-reducing SDS-PAGE (Lane “2” of FIG. 43) suggests that the protein is expressed as a dimer, which is in agreement with literature knowledge on IL-5 from other species.

### Example 3c: Expression of a Properly Folded Native cIL-13 in Bacteria (E. coli) Cells

[0365] A DNA construct encoding for cIL-13 of SEQ ID NO: 46 with a start methionine (M) at the N-terminus and a His₆-tag at the C-terminus was designed. This cIL-13-DNA construct was further designed to contain an artificial start codon ATG, flanking unique restriction enzyme sites (Ndel and HindIII) for straightforward subcloning, and a stop codon TGA.

[0366] After synthesizing this DNA construct, the DNA construct was subcloned into the pET30(+) E. coli expression vector via the restriction sites Ndel and HindIII, resulting in the vector pET30a-cIL-13 with 5619 bp in size (SEQ ID NO: 49; plasmid map shown in FIG. 50). Transfection grade plasmid was prepared for E. coli expression.

[0367] Expression of the cIL-13 construct from pET30a-cIL-13 was achieved as follows: E. coli strain BL21 Star™ (DE3) was transformed with recombinant plasmid. A single colony was inoculated into Lysogeny Broth (LS) medium containing related antibiotic. The culture was incubated at 37° C. at 200 rpm and then induced with Isopropyl β-D-1-thiogalactopyranoside (IPTG). SDS-PAGE was used to monitor the expression.

[0368] Expression was scaled up as follows: Recombinant BL21 (DE3) stored in glycerol was inoculated into Terrific Broth (TB) medium containing related antibiotic and cultured at 37° C. When the OD600 reached about 1.2, the cell culture was induced with IPTG at 15° C. for 16 h. Bacteria were harvested by centrifugation.

[0369] The purification of the expressed protein was performed as follows: Bacterial pellets were resuspended with lysis buffer followed by sonication. The precipitate after centrifugation was dissolved using denaturing agent. Target protein was obtained by one-step purification using a Ni column. Target protein was sterilized by 0.22 μm filter before stored in aliquots.

[0370] The concentration was determined by Bradford protein assay with BSA as standard. Approximately 10.5 mg of (in phosphate-buffered saline, PBS) soluble cIL-13-His₆, referred to in the following examples as cIL-13, was obtained from a bacterial pellet of a 1 L E. coli culture.

[0371] The protein purity and molecular weight of the expressed protein was determined by standard SDS-PAGE using a reducing loading buffer. BSA was used as a control. Reducing loading buffer (300 mM Tris-HCl, 10% SDS, 30% Glycerol, 0.5% bromophenol blue, 250 mM DTT, pH 6.8) was added to the protein samples, such that the protein samples had a concentration close to 0.5 mg/ml.

[0372] After mixing the protein samples with reducing loading buffer, they were heated at 100° C. for 5-10 min, centrifuged at 10000 rpm for 1 min, and then loaded (BSA 2 μg; cIL-13 1.86 μg) in a gel chamber of a precast gel (Genscript, Cat. No. M42012). SDS-PAGE with these gels was performed as outlined by the manufacturer (140 V for approximately 60 min). Thereafter, the gel was stained with Coomassie Blue.

[0373] The stained gel is shown in FIG. 51. Lane 1 depicts the size of BSA. Lane 2 depicts the size of the cIL-13 protein.

[0374] The band in lane 1 of the SDS-PAGE of FIG. 51 is in good agreement with the expected 66 kDa molecular weight of BSA. The size of the dominant band in lane 2 of the SDS-PAGE of FIG. 51 is in good agreement with the prediction expected from the protein sequence (13394.39 Da, calculated from the mature sequence using https://web.expasy.org/cgi-bin/protparam/protparam).

### Example 3d: Expression of a Properly Folded Native cIL-33-WT in Bacteria (E. coli) Cells

[0375] The cIL-33-WT protein sequence (SEQ ID NO: 50) corresponds to amino acids 110-263 of the full length dog IL-33 protein (Uniprot 097863), in analogy to the well-described amino acid 109-266 form of mouse IL-33 (Uniprot Q8BVZ5).

[0376] A DNA construct (SEQ ID NO: 52) encoding for cIL-33-WT (SEQ ID NO: 50) was designed to also encode for a start methionine (M) and a His₆-tag at the N-terminus. This construct was designed to contain an artificial start codon ATG, flanking unique restriction enzyme sites (Ndel and HindIII) for straightforward subcloning, and a stop codon TGA.

[0377] After synthesizing this DNA construct, it was subcloned into an pET30 (+) E. coli expression vector via the restriction sites Ndel and HindIII, resulting in the vector pET30a-canIL33-CS with 5742 bp in size (plasmid map shown in FIG. 57).

[0378] Expression of the His₆-cIL-33-WT construct from pET30a (+)-canIL33-WT was achieved as follows: pET30a(+)-canIL-33-WT-transformed BL21 (DE3) E. coli were inoculated into Terrific Broth (TB) medium containing kanamycin and cultured at 37° C. When the OD600 reached about 1.2, cell culture was induced with IPTG at 15° C. for 16 hours. Cells were harvested by centrifugation.

[0379] The purification of cIL-33-WT protein followed a typical His-tag protein purification scheme using a Ni²⁺ column. Cell pellets were resuspended with lysis buffer followed by sonication. The supernatant (soluble expression) after centrifugation was used for column chromatography. Target protein was dialyzed and sterilized by 0.22 μm filter before stored in aliquots. The concentration was determined by Bradford protein assay with BSA as a standard.

[0380] The concentration was determined by Bradford protein assay with BSA as standard. Approximately 10.01 mg of soluble (in 50 mM Tris-HCl, 10% Glycerol, 150 mM NaCl, pH 8.0) His₆-cIL-33-WT, referred to in the following examples as cIL-33-WT, was obtained from bacterial pellet of 1 L culture.

[0381] The protein purity and molecular weight of the expressed protein was determined by standard SDS-PAGE using a reducing loading buffer and BSA as a control as described for cIL-13 in Example 3c (2.00 μg of each loaded into gel chamber). The stained gel is shown in FIG. 58. Lane 1 depicts the size of BSA and is in good agreement with its expected 66 kDa molecular weight. Lane 2 depicts the size of the cIL-33-WT protein and is in good agreement with the prediction expected from the protein sequence (18578.54 Da, calculated from the mature sequence using https://web.expasy.org/cgi-bin/protparam/protparam).

### Example 3e: Expression of a Properly Folded Native cIL-33-CS in Bacteria (E. coli) Cells

[0382] A DNA construct encoding for cIL-33-CS was designed starting from cIL-33-WT. Each of the three 3 cysteine residues present in a IL-33-WT (SEQ ID NO: 50) were replaced by serine residues to improve stability of the gene product, resulting in IL-33-CS (SEQ ID NO: 51).

[0383] The DNA construct (SEQ ID NO: 53) encoding for cIL-33-CS was designed with a start methionine (M) and a His₆-tag at the N-terminus. This construct was designed to contain an artificial start codon ATG, flanking unique restriction enzyme sites (Ndel and HindIII) for straightforward subcloning, and a stop codon TGA.

[0384] After synthesizing this DNA construct, it was subcloned into an pET30 (+) E. coli expression vector via the restriction sites Ndel and HindIII, resulting in the vector pET30a-canIL33-CS with 5742 bp in size (plasmid map shown in FIG. 60).

[0385] Expression of the cIL-33-CS construct from pET30a-cIL33-CS was achieved as follows: pET30a(+)-canIL-33-CS-transformed BL21 (DE3) (E. coli) were inoculated into Terrific Broth (TB) medium containing kanamycin and cultured at 37° C. When the OD600 reached about 1.2, cell culture was induced with IPTG at 15° C. for 16 hours. Cells were harvested by centrifugation. The purification of His₆-canIL33-CS protein followed a typical His-tag protein purification scheme using a Ni²⁺ column. Cell pellets were resuspended with lysis buffer followed by sonication. The precipitate after centrifugation (inclusion bodies) was dissolved using denaturing agent and then subjected to column chromatography. Target protein was sterilized by 0.22 μm filter before stored in aliquots.

[0386] The concentration was determined by Bradford protein assay with BSA as standard. By the above procedure, approximately 10.4 mg of soluble (in phosphate buffered saline [PBS], 10% Glycerol, 0.5 M L-Arginine, pH 7.4) His₆-cIL-33-CS were obtained from bacterial pellet of 1 L culture.

[0387] The protein purity and molecular weight of the expressed protein was determined by standard SDS-PAGE using a reducing loading buffer and BSA as a control as described for cIL-13 in Example 3c (2.00 μg of each loaded into gel chamber). The stained gel is shown in FIG. 61. Lane 1 depicts the size of BSA and is in good agreement with its expected 66 kDa molecular weight. Lane 2 depicts the size of the cIL-33-CS protein, where the dominant band is in good agreement with the prediction expected from the protein sequence of cIL-33-CS (18530.36 Da, calculated from the mature sequence using https://web.expasy.org/cgi-bin/protparam/protparam).

### Example 3f: Expression of a Properly Folded Native cIL-4 in Bacteria (E. coli) Cells

[0388] A DNA construct (SEQ ID NO: 59) encoding for cIL-4 (SEQ ID NO: 56) was designed to also encode for a start methionine (M) and a His₆-tag at the N-terminus. This construct was designed to contain an artificial start codon ATG, flanking unique restriction enzyme sites (Ndel and HindIII) for straightforward subcloning, and a stop codon TGA.

[0389] After synthesizing this DNA construct, it was subcloned into an pET30 (+) E. coli expression vector via the restriction sites Ndel and HindIII, resulting in the vector pET30a-cIL-4 with 5601 bp in size (plasmid map shown in FIG. 70).

[0390] Expression of the cIL-4 construct from pET30a-cIL-4 was achieved as follows: E. coli strain BL21 Star™ (DE3) was transformed with recombinant plasmid. A single colony was inoculated into Lysogeny Broth (LS) medium containing related antibiotic. The culture was incubated at 37° C. at 200 rpm and then induced with Isopropyl β-D-1-thiogalactopyranoside (IPTG). SDS-PAGE was used to monitor the expression.

[0391] Expression was scaled up as follows: Recombinant BL21 (DE3) stored in glycerol was inoculated into Terrific Broth (TB) medium containing related antibiotic and cultured at 37° C. When the OD600 reached about 1.2, the cell culture was induced with IPTG at 15° C. for 16 h. Bacteria were harvested by centrifugation.

[0392] The purification of the expressed protein was performed as follows: Bacterial pellets were resuspended with lysis buffer followed by sonication. The precipitate after centrifugation was dissolved using denaturing agent. Target protein was obtained by one-step purification using a Ni column. Target protein was sterilized by 0.22 μm filter before stored in aliquots.

[0393] The concentration was determined by Bradford protein assay with BSA as standard. Approximately 10.78 mg of (in phosphate-buffered saline, PBS) soluble cIL-4-His₆, referred to in the following examples as cIL-4, was obtained from a bacterial pellet of a 1 L E. coli culture.

[0394] The protein purity and molecular weight of the expressed protein was determined by standard SDS-PAGE using a reducing loading buffer. BSA was used as a control. Reducing loading buffer (300 mM Tris-HCl, 10% SDS, 30% Glycerol, 0.5% bromophenol blue, 250 mM DTT, pH 6.8) and non-reducing loading buffer (300 mM Tris-HCl, 10% SDS, 30% Glycerol, 0.5% bromophenol blue, pH 6.8) were added to the protein samples respectively, such that the protein samples had a concentration close to 0.5 mg/ml.

[0395] After mixing, the protein sample with reducing loading buffer was heated at 100° C. for 5-10 min. The protein samples were centrifuged at 10000 rpm for 1 min, and then loaded (BSA 2 μg; cIL-4 2 μg) in a gel chamber of a precast gel (Genscript, Cat. No. M42012) and the appropriate running buffer. Electrophoresis was performed at 140 V for approximately 60 min. The Coomassie Blue-stained gel showed a band in Lane 1 that is in good agreement with the expected 66 kDa molecular weight of BSA. The size of the dominant band in lane 2 of the SDS-PAGE is in good agreement with the prediction expected from the cIL-4 protein sequence (13585.88 Da, calculated from the mature sequence using https://web.expasy.org/cgi-bin/protparam/protparam).

### Example 3g: Expression of a Properly Folded Native Fel-IL-31 in Mammalian Cells

[0396] A DNA construct (SEQ ID NO: 63) encoding for fel-IL-31 with an artificial ER import signal at the N-terminus and a His₆-tag at the C-terminus was designed. This fel-IL-31-DNA construct was further designed to contain a Kozak sequence upstream of the start codon of the protein to improve expression in mammalian cells and to contain flanking unique restriction enzyme sites for straightforward cloning. After synthesizing this DNA construct, the DNA construct was cloned into the pcDNA3.4 mammalian expression vector, resulting in the vector pcDNA3.4-fel-IL31. Large amounts of transfection grade plasmid were prepared for Expi293F cell expression.

[0397] Expression of the cIL-31 construct from pcDNA3.4-fel-IL31 was achieved as follows:

[0398] Expi293F cells were grown in serum-free Expi293™ expression Medium (Thermo Fisher Scientific). The cells were maintained in Erlenmeyer Flasks (Corning Inc.) at 37° C. with 8% CO₂ on an orbital shaker (VWR Scientific). One day before transfection, the cells were seeded at an appropriate density in Corning Erlenmeyer Flasks. On the day of transfection, the plasmid pcDNA3.4-fel-IL31 and transfection reagent were mixed at an optimal ratio and then added into the flask with cells ready for transfection. The cell culture supernatants collected on day 6 were used for purification.

[0399] The purification and analysis of the expressed protein was performed as follows:

[0400] The cell culture broth was centrifuged. The cell culture supernatant was loaded onto an Ni²⁺-NTA affinity purification column at an appropriate flowrate. After washing and elution with appropriate buffers, the eluted fractions were pooled and buffer exchanged to the final formulation buffer, which was PBS pH 7.2.

[0401] The purified protein was analyzed by SDS-PAGE and Coomassie Blue staining to determine its molecular weight and purity. To do so, the concentration of the purified polyprotein was determined by the Bradford assay with BSA as a standard for the calibration curve. Approximately 7.29 mg of (in phosphate-buffered saline, PBS) soluble fel-IL31-His₆, referred to in the following examples as fel-IL-31 or fIL-31, were obtained from 100 ml crude cell culture supernatant.

[0402] For the SDS-PAGE analysis the following loading buffers were used:
[0403] Reducing Loading buffer: 300 mM Tris-HCl, 10% SDS, 30% Glycerol, 0.5% bromophenol blue, 250 mM DTT, pH 6.8.
[0404] Non-Reducing Loading buffer: 300 mM Tris-HCl, 10% SDS, 30% Glycerol, 0.5% bromophenol blue, pH 6.8.

[0405] Reducing and non-reducing loading buffer were added to the protein samples, respectively. The protein samples with reducing or non-reducing loading buffer had a concentration close to 0.5 mg/ml. After mixing the protein samples with reducing loading buffer, heating at 100° C. for 5-10 min was performed. The protein samples with reducing or non-reducing loading buffer were centrifuged at 10000 rpm for 1 min, and then loaded in a gel chamber of a precast gel (Genscript, Cat. No. M42012). SDS-PAGE with these gels was performed as outlined by the manufacturer (140 V for approximately 60 min). Thereafter, the gel was stained with Coomassie Blue.

[0406] The dominant band in lane 1 of the Coomassie Blue-stained is considerably larger than expected from the protein sequence (16196.54 Da, calculated from the mature sequence using https://web.expasy.org/cgi-bin/protparam/protparam). This difference likely arises from extensive N-glycosylation since the fel-IL-31 protein sequence contains 2 N-glycosylation sites, both of which, based on NetNGlyc analysis (http://www.cbs.dtu.dk/services/NetNGlyc/), are likely to be modified.

[0407] Under non-reducing conditions, the bulk of the loaded protein migrated in a band indicative of a monomer. Only a minor proportion appears to be dimeric and multimeric or aggregated forms.

### Example 4: Performance of an In Vivo cIL-31 Activity Test (Pruritus/Itch Induction in Dogs)

[0408] To 16 dogs cIL-31 purified as described above in Example 3 was administered intravenously at a single dose of 1.75 μg/kg body weight. To this end, cIL-31 was prepared as liquid formulation in a sterile NaCl solution. The administered dose volume was 1 ml per dog.

[0409] The pruritic behavior was video recorded approximately 20-40 minutes after administration of the cIL-31 liquid formulation for 120 min.

[0410] The entire observation period of 120 min was split into 1-minute intervals (120 intervals). Categorical yes/no (“I/O”) decisions were made by the observers as following: All intervals, for which at least one pruritic behavior was displayed by the dog, were counted as “1”. All intervals without pruritic behavior were counted as “0”.

[0411] The type of pruritic behavior was defined by the first behavior occurring in each interval. The cumulative count within each observation period of 120 min provided the pruritus score. Pruritus induction was considered successful if a dog showed pruritic behavior during more than 60 intervals.

[0412] Pruritus was observed in all dogs after administration of the cIL-31 liquid formulation. In accordance with the above-defined criteria, pruritus was successfully induced in 13 out of 16 dogs. Adverse events were not observed during this study. In summary, this study therefore provides proof that the expressed cIL-31 construct is biologically active.

### Example 5: Testing Whether the cIL-31 Polyprotein Also Elicits Pruritus in Dogs

[0413] To three dogs cIL-31 polyprotein purified as described above in Example 2 was administered subcutaneously at a single dose of 200 μg. To this end, cIL-31 polyprotein was prepared as liquid formulation in PBS with Polygen as adjuvant. The dose volume was 1 mL per dog.

[0414] To evaluate the local and systemic tolerance of dogs against the injected polyprotein, rectal temperature was measured, adspection and palpation of injection sites for clinical signs of swelling, pain, redness and increased heat were performed. If clinical symptoms were found, the aforedescribed local and systemic tolerance assessments were done once weekly until clinical findings disappeared or until the study ended.

[0415] None of the dogs showed any signs of pruritus. Mild clinical signs like redness and excoriation were observed at the injection sites and an increased body temperature was observed in all dogs after the first administration and in two dog after the second administration, indicative of an induced immune response against the polyprotein.

### Example 6a: Generation and Characterization of a Polyclonal Rabbit Antiserum Against CIL-31

[0416] Approximately 500 μg cIL-31 was used as an antigen for the following 63 day immunization regimen (Davids Biotechnology, Regensburg/FRG) in New Zealand White rabbits:
[0417] Day 1: collection of preimmune serum, first immunization
[0418] Day 14: second immunization
[0419] Day 28: third immunization
[0420] Day 35: Test serum for intermediate ELISA titer
[0421] Day 42: fourth immunization
[0422] Day 56: fifth immunization
[0423] Day 63: harvest of antiserum

### Example 6b: Generation and Characterization of a Polyclonal Rabbit Antiserum Against CIL-5

[0424] Approximately 500 μg cIL-5 was used as an antigen in the 63 day immunization regimen described above in Example 6a.

### Example 6c: Generation and Characterization of a Polyclonal Rabbit Antiserum Against CIL-13

[0425] Approximately 500 μg cIL-13 was used as an antigen in the 63 day immunization regimen described above in Example 6a.

### Example 6d: Generation and Characterization of a Polyclonal Rabbit Antiserum Against CIL-33-WT

[0426] Approximately 500 μg cIL-13-WT was used as an antigen in the 63 day immunization regimen described above in Example 6a.

### Example 6e: Generation and Characterization of a Polyclonal Rabbit Antiserum Against CIL-4

[0427] Approximately 500 μg cIL-4 was used as an antigen in the 63 day immunization regimen described above in Example 6a.

### Example 6f: Generation and Characterization of a Polyclonal Rabbit Antiserum Against bov-TNF-alpha-poly

[0428] Approximately 500 μg bov-TNF-alpha polyprotein (SEQ ID NO: 65) was used as an antigen in the 63 day immunization regimen described above in Example 6a.

### Example 7: Generation of a Chicken IgY Preparation Against cIL-31 from Egg Yolk

[0429] Approximately 500 μg cIL-31 were used as an antigen for the following 63 day immunization regimen (Davids Biotechnology, Regensburg/FRG) in chickens:
[0430] Day 1: collection of preimmune Egg Yolk IgG/IgY, approx. 90% pure
[0431] Day 1: first immunization
[0432] Day 14: second immunization
[0433] Day 28: third immunization
[0434] Day 35: fourth immunization
[0435] Day 45-55: collection of the eggs
[0436] Day 63: preparation of eggs by a proprietary (Davids Biotechnology, Regensburg; Prep I), IgY preparation yielding a purity and quality comparable to an antiserum from rabbits

### Example 8a: Setup of Anti-cIL-31 and Anti-cIL-31 Polyprotein ELISA Formats for Rabbit Serum Antibody and Chicken Egg Yolk IgY Titer Determinations, Binding Studies to Native cIL-31 and to cIL-31 Polyprotein

[0437] Polystyrene ELISA plates (384 well: Thermo Maxisorp, Cat No. 464718) were coated with 1 μg/ml of either cIL-31 or cIL-31 polyprotein (cIL-31:0.29 mg/ml, or cIL-31 polyprotein: 0.4 mg/ml) dissolved in coating buffer (50 mM NaHCO₃ pH 9.6). Per well a volume of 10 μl coating solution was used. The Polystyrene ELISA plates were then incubated overnight (O/N) at 4° C. with a closed lid. After removal of the coating solution, three washes with PBS (ThermoFisher Phosphate-Buffered Saline, pH 7.2, Cat No. 20012-019), 0.05% (v/v) Tween 20 (50 μl per well) were performed. Subsequently, blocking of non-specific binding sites was performed with 50 μl per well of PBS, 0.05% (v/v) Tween 20, 3% (v/v) gelatin (from cold water fish skin, 40-50% in H₂O, Sigma C 7765). This blocking step was performed at room temperature (RT) for at least 1 h. After removal of the blocking solution, serial dilutions (from a non-adsorptive replica plate) of rabbit antiserum or chicken egg yolk preparations in PBS, 0.05% (v/v) Tween 20, 3% (v/v) gelatin were added (20 μl per well). Incubation with the serial dilutions was performed at RT for at least 1 h. Thereafter, the serial dilutions of rabbit antiserum or chicken egg yolk preparations were removed and three washes with PBS, 0.05% (v/v) Tween 20 (50 μl per well) were performed. Next, a 1:15,000 dilution of anti-Rabbit IgG (whole molecule), F(ab′)2 fragment-alkaline phosphatase (AP) antibody produced in goat (Sigma A3937, or equivalent), or a 1:5000 dilution of anti-Chicken IgY (IgG) (whole molecule)-AP antibody produced in rabbit (Sigma A9171, or equivalent) in PBS, 0.05% (v/v) Tween 20, 3% (v/v) gelatin (20 μl per well) were added and incubated at RT for at least 1 h. After removal of these antibody solutions, again three washes with PBS, 0.05% (v/v) Tween 20 (50 μl per well) were performed. Subsequently, the wells were washed once with AP buffer (50 mM NaHCO₃/Na₂CO₃, 2 mM MgCl₂, pH 9.6, 50 μl per well). Finally, 5 mM 4-nitrophenyl phosphate disodium salt hexahydrate (pNPP, Applichem, via Sigma, A1442,0050, or equivalent) in AP buffer (90 μl per well) was added. The increase in optical density (OD) at 405 nm per minute (mOD/min) was recorded at RT in an ELISA reader, for example the Epoch Reader (150115E) or the Synergy H1 Reder (180427C), and the curve slope was determined from a linear increase range.

[0438] The results of the ELISA using cIL-31 or cIL-31 polyprotein as antigen for the rabbit preimmune serum and antiserum are depicted in FIG. 5. This Figure shows that the rabbit antiserum recognized both the cIL-31 and the cIL-31 polyprotein construct, while the preimmune serum produced only a negligible signal in the applied ELISA format. The linear signal phase was observed for both antigens up to an antiserum dilution of 1:160, followed by a typical ELISA titration curve. The endpoint titers (last dilution with a signal higher than background signal plus two standard deviations) were >1:40,000 for cIL-31 and >1:80,000 for the cIL-31 polyprotein. These data suggest that the rabbit anti-cIL-31 serum generated in this study was of good quality.

[0439] The fact that cIL-31 polyprotein is equally well recognized as cIL-31 by an antiserum raised against the latter protein suggests that the copies of cIL-31 in the polyprotein are properly folded, despite the artificial repeat domain structure and the tetanus toxin spacer sequences. This result was surprising and could not be expected.

[0440] The results of the ELISA using cIL-31 or cIL-31 polyprotein as antigen for the chicken preimmune serum and egg yolk preparation are depicted in FIG. 6. As can be seen in this Figure, the chicken egg yolk preparation recognized cIL-31 and the cIL-31 polyprotein, while the chicken preimmune serum produced only a negligible signal in the applied ELISA format when diluted 1:250 (data not shown). The linear signal phase was observed for the cIL-31 polyprotein down to an egg yolk preparation dilution of 62.5 μg/ml, followed by a typical ELISA titration curve. For cIL-31, the linear phase ended at 125 μg/ml egg yolk protein. The endpoint titers of the egg yolk protein preparation (last dilution with a signal higher than background signal plus two standard deviations) were 122 ng/ml for cIL-31 and 61 ng/ml for cIL-31 polyprotein. These data suggest that the chicken egg yolk preparation generated in this study was of good quality.

[0441] The fact that cIL-31 polyprotein is roughly equally well recognized as cIL-31 by the chicken egg yolk antibodies which were raised against the latter protein again supports that the copies of cIL-31 in the polyprotein are properly folded, despite the artificial repeat domain structure and the tetanus toxin spacer sequences. This result was surprising and could not be expected.

### Example 8b: Setup of Anti-cIL-5 and Anti-cIL-5 Polyprotein ELISA Formats for Rabbit Serum Antibody Titer Determination, Binding Studies to Native cIL-5 and to cIL-5 Polyprotein

[0442] An ELISA was set up to test antiserum generated against cIL-5 in the same manner as in Example 8a for cIL-31. The 384-well polystyrene ELISA plates were coated, however, with 1-5 μg/ml of cIL-5 or 0.5 μg/ml of cIL-31-poly, dissolved in coating buffer as described in Example 8a.

[0443] The results of the titer determination of a rabbit anti-cIL-5 antiserum compared to its corresponding preimmune serum are shown in FIG. 44. The rabbit antiserum recognizes cIL-5, while the preimmune serum produces only a negligible signal in the applied ELISA format. The linear signal phase is visible up to an antiserum dilution of ca. 1:500, followed by a typical ELISA titration curve. The endpoint titers (last dilution with a signal>than background+2 standard deviations) are close to 1:200,000. These data suggest that the rabbit anti-cIL-5 serum generated in this study is of good quality.

[0444] The results of the ELISA using cIL-5 or cIL-5 polyprotein as antigen for the rabbit preimmune serum and antiserum are depicted in FIG. 45. This Figure shows that the rabbit antiserum recognized both the cIL-5 and the cIL-5 polyprotein construct, while the preimmune serum produced only a negligible signal in the applied ELISA format. While the absolute signal strength is lower in the case of cIL-5-poly compared to cIL-5, the curve shape is very similar in FIG. 45. This suggests that at least a proportion of the cIL-5 polypeptides in cIL-5-poly is in a native-like conformation, despite the artificial repeat domain structure and the tetanus toxin spacer sequences. This result was surprising and could not be expected.

### Example 8c: Setup of Anti-cIL-13 and Anti-cIL-13 Polyprotein ELISA Formats for Rabbit Serum Antibody Titer Determination, Binding Studies to Native cIL-13 and to cIL-13 Polyprotein

[0445] An ELISA was set up to test antiserum generated against cIL-13 in the same manner as in Example 8a for cIL-31. The 384-well polystyrene ELISA plates were coated, however, with 5 μg/ml of cIL-13 or 5 μg/ml of cIL-13-poly, dissolved in coating buffer as described in Example 8a.

[0446] The results of the titer determination of a rabbit anti-cIL-13 antiserum compared to its corresponding preimmune serum are shown in FIG. 53A. The rabbit antiserum recognizes cIL-13, while the preimmune serum produces only a negligible signal in the applied ELISA format. The linear signal phase is visible up to an antiserum dilution of ca. 1:5000, followed by a typical ELISA titration curve. The endpoint titers (last dilution with a signal>than background+2 standard deviations) exceed 1:500,000. These data suggest that the rabbit anti-cIL-13 serum generated in this study is of good quality.

[0447] In the case of cll-13-poly as coating antigen, the endpoint titer was close to 1:100,000 (FIG. 53 B), which confirms the abundant presence of anti-cIL-13 antibody binding sites on the vaccine antigen construct.

### Example 8d: Setup of Anti-cIL-33-WT and Anti-cIL-33-CS Polyprotein ELISA Formats for Rabbit Serum Antibody Titer Determination, Binding Studies to Native cIL-33 and to cIL-33-CS Polyprotein

[0448] An ELISA was set up to test antiserum generated against cIL-33-WT in the same manner as in Example 8a for cIL-31. The 384-well polystyrene ELISA plates were coated, however, with 5 μg/ml of cIL-33-WT or cIL-33-CS-poly, dissolved in coating buffer as described in Example 8a.

[0449] The results of the titer determination of a rabbit anti-cIL-13-WT antiserum compared to its corresponding preimmune serum are shown in FIG. 59. The rabbit antiserum recognizes cIL-33-WT, while the preimmune serum produces only a negligible signal in the applied ELISA format. The endpoint titers (last dilution with a signal>than background+2 standard deviations) exceed 1:10,000. These data suggest that the rabbit anti-cIL-33-WT serum generated in this study is of fair quality.

[0450] The results of the titer determination of a rabbit anti-cIL-13-CS-poly antiserum compared to its corresponding preimmune serum are shown in FIG. 66. The rabbit antiserum raised against cIL-33-WT recognizes cIL-33-CS-poly, while the preimmune serum produces only a negligible signal in the applied ELISA format. The linear signal phase is visible up to an antiserum dilution of ca. 1:320, followed by a typical ELISA titration curve. The endpoint titers (last dilution with a signal>than background+2 standard deviations) exceed 1:100,000. These data suggest that the cIL-33-CS-poly is actually a better binding partner to the anti-cIL-33-WT serum than the parental antigen. It is likely that the polymeric nature of cIL-33-CS-poly contributes to this property. Also, the result suggests that the C→S mutations have not changed antigenicity of cIL-33-CS compared to cIL-33-WT to a large extent.

### Example 8e: Setup of Anti-cIL-4 and Anti-cIL-4 Polyprotein ELISA Formats for Rabbit Serum Antibody Titer Determination, Binding Studies to Native cIL-4, cIL-4 Polyprotein, and to cIL-13

[0451] An ELISA was set up to test antiserum generated against cIL-4 in the same manner as in Example 8a for cIL-31. The 384-well polystyrene ELISA plates were coated, however, with 1 μg/ml of cIL-4 (FIG. 71A) or 2.5 μg/ml of cIL-4-poly (FIG. 71B), dissolved in coating buffer as described in Example 8a.

[0452] The results of the ELISA using cIL-4 or cIL-4 polyprotein as antigen for the rabbit preimmune serum and antiserum are depicted in FIG. 71A.

[0453] The rabbit antiserum recognizes cIL-4, while the preimmune serum produces only a negligible signal in the applied ELISA format. The linear signal phase is visible up to an antiserum dilution of ˜1:80, followed by a typical ELISA titration curve. The endpoint titers (last dilution with a signal>than background+2 standard deviations) exceed 1:150,000. These data suggest that the rabbit anti-cIL-4 serum generated in this study is of good quality.

[0454] In the case of cIL-4-poly as coating antigen, the endpoint titer was close to 1:50,000 (FIG. 71B), which confirms the abundant presence of anti-cIL-4 antibody binding sites on the vaccine antigen construct.

[0455] In addition, a rabbit serum raised against cIL-13 was tested. This serum produced only a minor signal at low dilutions, orders of magnitudes lower than that of the specific anti-cIL-4 antiserum (FIG. 71B). These data demonstrate that the cIL-4-poly construct contains antigenic determinants of canine IL-4.

### Example 8f: Setup of Anti-Bov-TNF-Alpha Polyprotein ELISA Formats for Rabbit Serum Antibody Titer Determination

[0456] An ELISA was set up to test antiserum generated against bovine TNF-alpha-polyprotein in the same manner as in Example 8a for cIL-31. The 384-well polystyrene ELISA plates were coated, however, with 1 μg/ml of bov-TNF-alpha (R&D Systems), dissolved in coating buffer as described in Example 8a.

[0457] The results of the titer determination of a rabbit anti-bov-TNF-alpha-poly antiserum compared to its corresponding preimmune serum are shown in FIG. 79. The rabbit antiserum recognizes bovine TNF-alpha, while the preimmune serum produces only a negligible signal in the applied ELISA format. Thus, immunization of a rabbit with bov-TNFa-poly leads to a high titer anti-bovine-TNF-α antiserum. The endpoint of this antiserum is beyond a 1:40,000 dilution, and saturation is seen up to 1:200 dilution. This demonstrates that the intended immunogenicity of bov-TNFa-poly has been achieved using the polyprotein construct of the invention.

### Example 9: Setup of an ELISA Format for Binding of the cIL-31 Neutralizing Canine Monoclonal Antibody (mAb) Lokivetmab to Native cIL-31 and to cIL-31 Polyprotein

[0458] Lokivetmab is a caninized monoclonal antibody directed against canine IL-31 (Michels et al., “A blinded, randomized, placebo-controlled, dose determination trial of lokivetmab (ZTS-00103289), a caninized, anti-canine IL-31 monoclonal antibody in client owned dogs with atopic dermatitis”, Veterinary dermatology 27.6 (2016): 478-e129) and forms the active of the veterinary drug Cytopoint®.

[0459] The following ELISA format to test the binding of lokivetmab to cIL-31 or cIL-31 polyprotein was developed:

[0460] Polystyrene ELISA plates (384 well: Thermo Maxisorp, Cat No. 464718) were coated with 1 μg/ml of either cIL-31 or cIL-31 polyprotein (cIL-31:0.29 mg/ml, or cIL-31 polyprotein: 0.4 mg/ml) dissolved in coating buffer (50 mM NaHCO₃ pH 9.6). Per well a volume of 10 μl coating solution was used. The Polystyrene ELISA plates were then incubated overnight (O/N) at 4° C. with a closed lid. After removal of the coating solution, three washes with PBS (ThermoFisher Phosphate-Buffered Saline (PBS), pH 7.2, Cat No. 20012-019), 0.05% (v/v) Tween 20 (50 μl per well) were performed. Subsequently, blocking of non-specific binding sites was performed with 50 μl per well of PBS, 0.05% (v/v) Tween 20, 3% (v/v) gelatin (from cold water fish skin, 40-50% in H₂O, Sigma C 7765). This blocking step was conducted at RT for at least 1 h. After removal of the blocking solution, serial dilutions (from a non-adsorptive replica plate) of lokivetmab in PBS, 0.05% (v/v) Tween 20, 3% (v/v) gelatin were added (20 μl per well). Incubation with the serial dilutions of lokivetmab was performed at RT for at least 1 h. Thereafter, the serial dilutions of lokivetmab were removed and three washed with PBS, 0.05% (v/v) Tween 20 (50 μl per well) were performed. Next, a 1:5000 dilution of protein A-AP (P7488 Sigma) or a 1:2000 dilution of anti-dog-IgG-AP (Sigma Lot RI6082 0.61 mg/ml) in PBS, 0.05% (v/v) Tween 20, 3% (v/v) gelatin (20 μl per well) was added and incubated at RT for at least 1 h. After removal of these solutions, again three washes with PBS, 0.05% (v/v) Tween 20 (50 μl per well) were performed. Subsequently, the wells were washed once with AP buffer (50 mM NaHCO₃/Na₂CO₃, 2 mM MgCl₂, pH 9.6, 50 μl per well). Finally, 5 mM 4-nitrophenyl phosphate disodium salt hexahydrate (pNPP, Applichem, via Sigma, A1442,0050, or equivalent) in AP buffer (90 μl per well) was added. The increase in optical density (OD) at 405 nm per minute (mOD/min) was recorded at RT in an ELISA reader and the curve slope was determined from a linear increase range.

[0461] The results of the ELISA using cIL-31 as antigen for lokivetmab are depicted in FIG. 7. These results suggest that lokivetmab binds to cIL-31 and that it can be detected by anti-dog-IgG reagents. Lokivetmab bound to cIL-31, however, is only poorly recognized by protein A.

[0462] The results of the ELISA using cIL-31 and cIL-31 polyprotein as antigen for lokivetmab are depicted in FIG. 8. These results demonstrate that lokivetmab binds to cIL-31 and cIL-31 polyprotein. This suggest that copies of cIL-31 in the polyprotein have a native fold.

### Example 10: Generation and Characterization of Biotinylated Lokivetmab

[0463] For biotinylating lokivetmab, Zeba 0.5 ml Spin desalting columns (40K) were first equilibrated with 50 mM NaHCO₃, 150 mM NaCl, pH 8.5. Next, 100 μl lokivetmab (10 mg/ml) were passed twice through the equilibrated columns. Thereafter, 20 μl 10 mM EZ-Link™ sulfon-NHS-LC-LC-Biotin (Thermo Scientific 21338) was added to the lokivetmab-containing solution and incubated for 4 h at 37° C. After this incubation, 1 μl 1 M Tris pH 8.0 was added. After equilibration of further Zeba 0.5 ml Spin desalting columns with PBS pH 7.2, the reaction mixture containing lokivetmab was passed though the PBS-equilibrated columns and filled up with PBS to a final volume of 200 μl and a concentration of 5 mg/ml biotinylated lokivetmab was assumed.

[0464] Next, an ELISA format to test the cIL-31 binding of biotinylated lokivetmab was developed:

[0465] Polystyrene ELISA plates (384 well: Thermo Maxisorp, Cat No. 464718) were coated with 1 μg/ml of either cIL-31 or cIL-31 polyprotein (cIL-31:0.29 mg/ml, or cIL-31 polyprotein: 0.4 mg/ml) dissolved in coating buffer (50 mM NaHCO₃ pH 9.6). Per well a volume of 10 μl coating solution was used. The Polystyrene ELISA plates were then incubated overnight (O/N) at 4° C. with a closed lid. After removal of the coating solution, three washes with PBS (ThermoFisher Phosphate-Buffered Saline (PBS), pH 7.2, Cat No. 20012-019), 0.05% (v/v) Tween 20 (50 μl per well) were performed. Subsequently, blocking of non-specific binding sites was performed with 50 μl per well of PBS, 0.05% (v/v) Tween 20, 3% (v/v) gelatin (from cold water fish skin, 40-50% in H₂O, Sigma C 7765). This blocking step was conducted at RT for at least 1 h. After removal of the blocking solution, serial dilutions (from a non-adsorptive replica plate) of lokivetmab in PBS, 0.05% (v/v) Tween 20, 3% (v/v) gelatin were added (20 μl per well). Incubation with the serial dilutions of biotinylated lokivetmab was performed at RT for at least 1 h. Thereafter, the serial dilutions of biotinylated lokivetmab were removed and three washed with PBS, 0.05% (v/v) Tween 20 (50 μl per well) were performed. Next, a 1:17.000 dilution of ExtrAvidin®-AP (Sigma E2636) in PBS, 0.05% (v/v) Tween 20, 3% (v/v) gelatin (20 μl per well) was added and incubated at RT for at least 1 h. After removal of this solution, again three washes with PBS, 0.05% (v/v) Tween 20 (50 μl per well) were performed. Subsequently, the wells were washed once with AP buffer (50 mM NaHCO₃/Na₂CO₃, 2 mM MgCl₂, pH 9.6, 50 μl per well). Finally, 5 mM 4-nitrophenyl phosphate disodium salt hexahydrate (pNPP, Applichem, via Sigma, A1442,0050, or equivalent) in AP buffer (90 μl per well) was added. The increase in optical density (OD) at 405 nm per minute (mOD/min) was recorded at RT in an ELISA reader and the curve slope was determined from a linear increase range.

[0466] The results of the ELISA using cIL-31 as antigen for biotinylated lokivetmab are depicted in FIG. 9. These results suggest that biotinylation of lokivetmab was successful since a strong titratable signal was observed in the employed ELISA setup.

### Example 11: Setup of a Biotinylated Lokivetmab Competition Assay Format

[0467] The rabbit preimmune serum, the rabbit anti-cIL-31 antiserum (see Example 6), cIL-31 polyprotein 0.4 mg/ml (Genscript), cIL-31 0.29 mg/ml (Genscript) and lokivetmab-biotin (see Example 10) were used to set up a lokivetmab competition assay.

[0468] The biotinylated lokivetmab competition assay format was designed as follows:

[0469] Polystyrene ELISA plates (384 well: Thermo Maxisorp, Cat No. 10192781) were coated with 1 μg/ml of either cIL-31 or cIL-31 polyprotein (stock solutions in PBS: cIL-31:0.29 mg/ml, or cIL-31 polyprotein: 0.4 mg/ml) dissolved in coating buffer (50 mM NaHCO₃ pH 9.6). Per well a volume of 10 μl coating solution was used. The Polystyrene ELISA plates were then incubated overnight (O/N) at 4° C. with a closed lid. After removal of the coating solution, three washes with PBS (ThermoFisher Phosphate-Buffered Saline (PBS), pH 7.2, Cat No. 20012-019), 0.05% (v/v) Tween 20 (35 μl per well) were performed. Subsequently, blocking of non-specific binding sites was performed with 35 μl per well of PBS, 0.05% (v/v) Tween 20, 3% (v/v) gelatin (from cold water fish skin, 40-50% in H₂O, Sigma C 7765). This blocking step was conducted at RT for at least 1 h with a closed lid. Serial dilutions from a of rabbit preimmune, rabbit anti-cIL-31 immune serum or of chicken egg yolk IgY preparation in 100 ng/ml biotinylated lokivetmab in PBS, 0.05% (v/v) Tween 20, 3% (v/v) gelatin were prepared in a separate non-absorptive ELISA plate and incubated for about 1 h at RT. After removing the blocking solution from the cIL-31 or cIL-31 polyprotein coated ELISA plate, the preincubated serial antibody dilutions were added (20 μl per well). Incubation with the serial antibody dilutions was performed at RT for about 1 h. Thereafter, the serial antibody dilutions were removed and three washed with PBS, 0.05% (v/v) Tween 20 (35 μl per well) were performed. Next, a 1:17.000 dilution of ExtrAvidin®-AP (Sigma E2636) in PBS, 0.05% (v/v) Tween 20, 3% (v/v) gelatin (20 μl per well) was added and incubated at RT for at least 1 h with a closed lid. After removal of this solution, again two washes with PBS, 0.05% (v/v) Tween 20 (35 μl per well) were performed. Subsequently, the wells were washed once with AP buffer (50 mM NaHCO₃/Na₂CO₃, 2 mM MgCl₂, pH 9.6, 50 μl per well). Finally, 5 mM 4-nitrophenyl phosphate disodium salt hexahydrate (pNPP, Applichem, via Sigma, A1442,0050, or equivalent) in AP buffer (90 μl per well) was added. The increase in optical density (OD) at 405 nm per minute (mOD/min) was recorded at RT in an ELISA reader and the curve slope was determined from a linear increase range.

[0470] The ELISA set-up using a mixture of rabbit preimmune serum+biotinylated lokivetmab or a mixture of rabbit immune serum+biotinylated lokivetmab probes for the interaction between biotinylated lokivetmab as cIL-31 neutralizing antibody and cIL-31 or cIL-31 polyprotein immobilized on an ELISA plate. The results of FIGS. 10 and 11 show that rabbit preimmune serum does not interfere with the binding of lokivetmab to either cIL-31 or cIL-31 polyprotein. The anti-cIL-31 rabbit immunserum, however, exhibits inhibitory activity for this interaction starting at a dilution of 1:128 to 1:64 and leading to complete inhibition of lokivetmab binding at a dilution of 1:2.

[0471] The ELISA set-up using a mixture of chicken egg yolk IgY preparation+biotinylated lokivetmab probes for the interaction between biotinylated lokivetmab as cIL-31 neutralizing antibody and cIL-31 immobilized on an ELISA plate. The results of FIG. 12 show that the anti-cIL-31 chicken egg yolk IgY preparation exhibited inhibitory activity for this interaction starting between 122 and 244 μg/ml and leading to complete inhibition of biotinylated lokivetmab binding at 15.6 mg/ml.

### Example 12a: Generation of a Dog Monocyte Cell Line (DH82) Allowing to Evaluate the NFkB-Stimulating Potential of Oligodeoxynucleotides (CpG-ODNs)

[0472] The dog monocyte cell line DH82 (Wellman et al. 1988) was transfected with pcDNA3.1(+)-bsd-NFkB-SEAP (plasmid map included as FIG. 13). This resulted in a blasticidin S-selected cell line that could be stimulated to secreted embryonic alkaline phosphatase (SEAP) secretion by a number of NFkB pathway activating ligands (such as LPS or TNF-α). Single cell cloning was performed to obtain a clonal cell line.

[0473] This clonal cell line (DH82-bsd-NFSEAP) was exposed to different phosphorothioate oligodeoxynucleotides (PTO-ODNs). A strong concentration-dependent SEAP signal was observed for three different PTO-ODNs with the order of potency 1668-PTO>>2006-PTO>2007-PTO (see FIG. 14).

[0474] The results of FIG. 14 suggest that DH82 expresses functional toll-like receptor 9 (TLR9) since it is the only known receptor recognizing PTO-ODNs and leading to NFkB signaling. Moreover, the results of FIG. 14 surprisingly show that in particular 1668-PTO (SEQ ID NO: A) is a potent activator of dog TLR9.

### Example 12b: Stimulating Potential of cIL-13 in HEK-Blue™ IL-13 Cells

[0475] HEK-Blue™ IL-4/IL-13 cells (Invivogen, hkb-il413) are stably transfected with the human STAT6 gene to obtain a fully active STAT6 pathway. Furthermore, the cells are transfected with a STAT6-inducible SEAP reporter gene. The receptor subunits IL4Rα and IL-13Rα1 as well as other genes of the signaling pathway are naturally expressed in sufficient amounts. These cells are responsive to human IL-4 and human Il-13 (https://www.invivogen.com/hek-blue-il4-il13, data not shown).

[0476] Testing of these cells with cIL-13 revealed that this cytokine is sensitively recognized by HEK-Blue™ IL-4/IL-13 cells and results in a SEAP reporter enzyme readout with ˜2 ng/ml (2000 μg/ml) EC₅₀ (see FIG. 52).

### Example 12c: Stimulating Potential of cIL-33-WT and cIL-33-CS in HEK-Blue™ IL-33 Cells

[0477] HEK-Blue™ IL-33 cells (Invivogen, hkb-hiL33) were used to evaluate the stimulating potential of cIL-33-WT and cIL-33-CS proteins. The cells had been generated by stable transfection of human embryonic kidney HEK293-derived cells with the human IL1RL1 gene. In addition, the TNF-α and the IL-1β responses were blocked. Therefore, HEK-Blue™ IL-33 cells respond specifically to IL-33. These cells express an NF-κB/AP-1-inducible SEAP reporter gene. The binding of human IL-33 to the heterodimeric IL-1RL1/IL-1RAcP on the surface of these cells is known to trigger a signaling cascade leading to the activation of NF-κB and the subsequent production of SEAP.

[0478] These cells are responsive to human IL-33 (https://www.invivogen.com/hek-blue-il33). Testing of these cells with canine IL-33 revealed that cIL-33-WT from different sources is variably recognized (FIG. 62, “cIL-33-WT Batch1” with closed triangles, and “cIL-33-WT Batch2” with closed squares) and appears to lose stimulatory activity over time (inventors' own observation, data not shown), presumably due to oxidation of the thiol-containing cysteine residues.

[0479] However, cIL-33-CS is sensitively recognized by HEK-Blue™ IL-33 cells, and results in a SEAP reporter enzyme readout with ˜10 ng/ml EC₅₀ (FIG. 62, closed circles) after the three cysteines in cIL-33-WT are mutated to serines (cIL-33-CS).

### Example 13a: Design of a cIL-31-Polyprotein/PTO-ODN/Polygen Vaccine Formulation and Immunization Study

[0480] The cIL-31 polyprotein vaccine was defined to contain:
[0481] 200 μg cIL-31-poly (SEQ ID NO: 4 and/or SEQ ID NO: 40)
[0482] 50 μg 1668-PTO (SEQ ID NO: 5)
[0483] 50 μg 2006-PTO (SEQ ID NO: 6)
[0484] in 900 μl PBS
[0485] +100 μl Polygen

[0486] The immunization of the dogs was performed by subcutaneous injections as follows:
[0487] Day 0: primary immunization with the cIL-31 polyprotein vaccine as defined above and collection of a blood sample (preimmune sample)
[0488] Day 7: collection of a blood sample
[0489] Day 14: collection of a blood sample
[0490] Day 21: collection of a blood sample
[0491] Day 28: secondary immunization with the cIL-31 polyprotein vaccine as defined above and collection of a blood sample
[0492] Day 35: collection of a blood sample
[0493] Day 42: collection of a blood sample
[0494] Day 49: collection of a blood sample
[0495] Day 56: collection of a blood sample
[0496] Day 63: collection of a blood sample
[0497] Day 70: collection of a blood sample

### Example 13b: Design of a cIL-5-Polyprotein/PTO-ODN/Polygen Vaccine Formulation and Immunization Study

[0498] The cIL-5 polyprotein vaccine was defined to contain:
[0499] 23 μg cIL-5-poly (SEQ ID NO: 42)
[0500] 50 μg 1668-PTO (SEQ ID NO: 5)
[0501] 50 μg 2006-PTO (SEQ ID NO: 6)
[0502] in 1000 μl PBS
[0503] +110 μl Polygen

[0504] The immunization and blood sampling scheme of three dogs (Dog 1 (0368), Dog 2 (9641), Dog 3 (0852)) was performed as described for Example 13a, except that sampling did not include Day 70.

### Example 13c: Design of a cIL-13-Polyprotein/PTO-ODN/Polygen Vaccine Formulation and Immunization Study

[0505] One injection dose of the cIL-5 polyprotein vaccine was defined to contain:
[0506] 50 μg cIL-13-poly (SEQ ID NO: 47)
[0507] 50 μg 1668-PTO (SEQ ID NO: 5)
[0508] 50 μg 2006-PTO (SEQ ID NO: 6)
[0509] in 900 μl PBS
[0510] +100 μl Polygen

[0511] The immunization and blood sampling scheme of three dogs (Dog cIL-13-1 (0521), Dog cIL-13-2 (2579), Dog cIL-13-3 (6048)) was performed as described for Example 13a, except that sampling did not include Day 70.

### Example 13d: Design of a cIL-33-Polyprotein/PTO-ODN/Polygen Vaccine Formulation and Immunization Study

[0512] The cIL-33-CS polyprotein vaccine was defined to contain:
[0513] 100 μg cIL-33-CS-poly (SEQ ID NO: 54)
[0514] 50 μg 1668-PTO (SEQ ID NO: 5)
[0515] 50 μg 2006-PTO (SEQ ID NO: 6)
[0516] in 900 μl PBS
[0517] +100 μl Polygen

[0518] The immunization and blood sampling scheme of one dog (Dog 402) was performed as described for Example 13a, except that sampling did not include Day 70. The presence of specific anti-cIL-33 antibodies was assessed in a classical plate-bound antigen ELISA setup. The wild type form of cIL-33 was used in this analysis, to exclude any effect specific for the C→S mutations.

### Example 13e: Design of a cIL-4-Polyprotein/PTO-ODN/Polygen Vaccine Formulation and Immunization Study

[0519] One injection dose of the cIL-4 polyprotein vaccine was defined to contain:
[0520] 200 μg cIL-4-poly (SEQ ID NO: 57)
[0521] 50 μg 1668-PTO (SEQ ID NO: 5)
[0522] 50 μg 2006-PTO (SEQ ID NO: 6)
[0523] in 900 μl PBS
[0524] +100 μl Polygen

[0525] The immunization and blood sampling scheme of three dogs (Dog 5365, Dog 6523, Dog 7104) was performed as described for Example 13a, except that sampling did not include Day 70.

### Example 13f: Design of a Fel-IL-31-Polyprotein/PTO-ODN/Polygen Vaccine Formulation and Immunization Study

[0526] 100 μg fel-IL-31-poly (SEQ ID NO: 61)
[0527] 25 μg 1668-PTO (SEQ ID NO: 5)
[0528] 25 μg 2006-PTO (SEQ ID NO: 6)
[0529] in 900 μl PBS
[0530] +100 μl Polygen

[0531] The immunization and blood sampling scheme of three cats (Cat 3132, Cat 0487, Cat 5674) was performed as described for Example 13a, except that the secondary immunization took place on Day 35 and blood samples were also drawn on Days 77, 84, 91, 98, 105, 112, 119, and 126.

### Example 13g: Design of Further Polyprotein/PTO-ODN/Polygen Vaccine Formulations and Immunizations

[0532] Further polyprotein vaccines can be defined to contain:
[0533] 200 μg of SEQ ID NO: 65 or any one of SEQ ID NOs: 202 to 329
[0534] 50 μg 1668-PTO (SEQ ID NO: 5)
[0535] 50 μg 2006-PTO (SEQ ID NO: 6)
[0536] in 900 μl PBS
[0537] +100 μl Polygen

[0538] The immunization and blood sampling can be performed as described for Example 13a.

### Example 14a: Determination of Anti-cIL-31 Titers in the Immunized Dogs

[0539] The dog sera obtained from the immunized dogs (see Example 13a) were tested for the presence anti-cIL-31 antibodies based on the following ELISA format:

[0540] Polystyrene ELISA plates (384 well: Thermo Maxisorp, Cat No. 464718) were coated with 1 μg/ml of either cIL-31 or cIL-31 polyprotein (cIL-31:0.29 mg/ml, or cIL-31 polyprotein: 0.4 mg/ml) dissolved in coating buffer (50 mM NaHCO₃ pH 9.6). Per well a volume of 10 μl coating solution was used. The Polystyrene ELISA plates were then incubated overnight (O/N) at 4° C. with a closed lid. After removal of the coating solution, three washes with PBS (ThermoFisher Phosphate-Buffered Saline (PBS), pH 7.2, Cat No. 20012-019), 0.05% (v/v) Tween 20 (50 μl per well) were performed. Subsequently, blocking of non-specific binding sites was performed with 50 μl per well of PBS, 0.05% (v/v) Tween 20, 3% (v/v) gelatin (from cold water fish skin, 40-50% in H₂O, Sigma C 7765). This blocking step was conducted at RT for at least 1 h. After removal of the blocking solution, serial dilutions (from a non-adsorptive replica plate) of dog sera in PBS, 0.05% (v/v) Tween 20, 3% (v/v) gelatin were added (20 μl per well). Incubation with the serial dilutions of dog sera was performed at RT for at least 1 h.

[0541] Thereafter, the serial dilutions of dog sera were removed and thrice washed with PBS, 0.05% (v/v) Tween 20 (50 μl per well) were performed.

[0542] Next, a 1:2,000 dilution of Rabbit IgG anti-Dog IgG (Fc)-Alk. Phos., MinX none (Dianova GmbH, SKU 304-055-008, or equivalent) in PBS, 0.05% (v/v) Tween 20, 3% (v/v) gelatin (20 μl per well) was added and incubated at RT for at least 1 h. After removal of this solution, again three washes with PBS, 0.05% (v/v) Tween 20 (50 μl per well) were performed. Subsequently, the wells were washed once with AP buffer (50 mM NaHCO₃/Na₂CO₃, 2 mM MgCl₂, pH 9.6, 50 μl per well). Finally, 5 mM 4-nitrophenyl phosphate disodium salt hexahydrate (pNPP, Applichem, via Sigma, A1442,0050, or equivalent) in AP buffer (90 μl per well) was added. The increase in optical density (OD) at 405 nm per minute (mOD/min) was recorded at RT in an ELISA reader and the curve slope was determined from a linear increase range.

[0543] FIGS. 15a-c to 17a-c depict the results of these ELISAs which show that the immunized dogs produced anti-cIL-31 antibodies in considerable amounts already 14 days after immunization. High anti-cIL-31 titers could also still be observed on day 112 after the primary immunization uniformly in all three dogs.

### Example 14b: Determination of Anti-cIL-5 Titers in the Immunized Dogs

[0544] The dog sera obtained from the immunized dogs (see Example 13b) were tested for the presence anti-cIL-5 antibodies based on the same ELISA format as described in Example 14a for anti-cIL-31 antibodies. The 384-well polystyrene ELISA plates were coated with 1-5 μg/ml of cIL-5 dissolved in coating buffer.

[0545] FIG. 46 (A-F) depicts the results of these ELISAs which show that two cIL-5-poly immunized dogs produced anti-cIL-5 antibodies in considerable amounts already 28 days after immunization (FIGS. 46 A and 46 E). The booster immunization at day 28 led to a further massive anti-cIL-5 antibody titer increase in these two dogs, that peaked at day 42 (FIGS. 46 B and 46 F). Titers remained high at the last sampling point, day 63, and likely extend beyond. One dog showed an overall poor response to cIL-5-poly vaccination (FIG. 46 C-D), but an effect of the booster immunization at day 28 was visible (FIG. 46 D).

### Example 14c: Determination of Anti-cIL-13 Titers in the Immunized Dogs

[0546] The dog sera obtained from the immunized dogs (see Example 13c) were tested for the presence anti-cIL-13 antibodies based on the same ELISA format as described in Example 14a for anti-cIL-31 antibodies. The 384-well polystyrene ELISA plates were coated with 1-5 μg/ml of cIL-13 (stock solution: cIL-13:0.15 mg/mL) dissolved in the coating buffer.

[0547] FIG. 54 depicts the results of these ELISAs. The cIL-13-poly immunized dogs showed only minor anti-cIL-13 antibody development in the primary immunization up to day 28 (FIG. 54 A-C). However, the booster immunization at day 28 led to a massive anti-cIL-13 antibody titer increase in all three dogs, that peaked around day 35-day 42, and lasted to day 63, and likely beyond (FIG. 54 A-C).

### Example 14d: Determination of Anti-cIL-33-CS Titers in the Immunized Dogs

[0548] The dog sera obtained from the immunized dogs (see Example 13d) were tested for the presence anti-cIL-33 antibodies based on the same ELISA format as described in Example 14c for anti-cIL-33 antibodies. The 384-well polystyrene ELISA plates were coated with 1-5 μg/ml of cIL-33-WT (to exclude any C→S abnormalities) dissolved in the coating buffer.

[0549] FIG. 67 depicts the results of these ELISAs. The cIL-33-CS-poly immunized dog showed no anti-cIL-33-WT antibody development in the primary immunization up to day 28 (FIG. 67, open symbols). However, the booster immunization at day 28 led to an increase in anti-cIL-33-WT antibody titers, that peaked at day 42, and lasted to day 63, with little decrease over time (FIG. 67, closed symbols).

[0550] These results show that the designed cIL-33-CS-poly antigen leads to breakage of self-tolerance to cIL-33-WT.

### Example 14e: Determination of Anti-cIL-4 Titers in the Immunized Dogs

[0551] The dog sera obtained from the immunized dogs (see Example 13e) were tested for the presence anti-cIL-4 antibodies based on the same ELISA format as described in Example 14a for anti-cIL-31 antibodies. The only exception was that the 384-well polystyrene ELISA plates were coated with 1 μg/ml of cIL-4 (ex Genscript cIL-4, 0.84 mg/ml) dissolved in the coating buffer.

[0552] FIG. 72 depicts the results of these ELISAs. The cIL-4-poly immunized dogs showed only minor anti-cIL-4 antibody development in the primary immunization up to day 35 (FIG. 72 A-C). However, the booster immunization at day 35 led to a massive anti-cIL-4 antibody titer increase in one dog (Dog 5365; FIG. 72A) that peaked around day 42, and lasted through day 63, and likely beyond. Two dogs (Dog 6523, FIG. 72B and Dog 7104, FIG. 72C) showed essentially the same picture, but with weaker titers after boost than Dog 5365. This experiment shows that the designed cIL-4-poly antigen in the chosen formulation leads to breakage of self-tolerance to cIL-4.

### Example 14f: Determination of Anti-Fel-IL-31 Titers in the Immunized Cats

[0553] The feline sera obtained from the immunized cats (see Example 13f) were tested for the presence anti-cIL-31 antibodies based on the same ELISA format as described in Example 14a for anti-cIL-31 antibodies in dogs. The only exception was that the 384-well polystyrene ELISA plates were coated with 1 μg/ml of fel-IL-4 (ex Genscript U6344FL160-4, fel-IL-31, 0.54 mg/ml) dissolved in the coating buffer.

[0554] FIGS. 75 and 76 depict the results of these ELISAs. Two out of the three fel-IL-31-poly immunized cats (Cat 3132 and Cat 5674) showed only minor or no anti-fel-IL-31 antibody development in the primary immunization up to day 27 (FIG. 75A-C). However, the booster immunization at day 27 led to a massive anti-fel-IL-31 antibody titer increase in all three cats that remained high from day 35 to day 63 (FIG. 75A-C). Further ELISA analysis of blood samples until day 126 (FIG. 76) showed that specific antibody titers declined only very slowly, with significant titers still present 4 months after primary immunization and 3 months after secondary immunization (FIG. 76A-C).

[0555] This experiment shows that the designed fel-IL-31-poly antigen leads to breakage of self-tolerance to fel-IL-31 in cats, with long-lasting anti-fel-IL-31 antibody titers.

### Example 15: Test for Competition of the Polyclonal Dog Antibodies with Biotinylated Lokivetmab to Analyze the Presence of cIL-31 Neutralizing Antibodies in the Dog Sera

[0556] The ELISA assay was performed as described in Example 11, but using a mixture of dog sera in 100 ng/ml biotinylated lokivetmab in PBS.

[0557] FIGS. 18 to 23 depict the results of the ELISA using cIL-31 as antigen for the mixture comprising dog serum from day 42 after immunization and 100 ng/ml biotinylated lokivetmab. While in FIGS. 18, 20 and 22 the unit of the response is “mOD405/min” and thus the direct readout from the reporter response, FIGS. 19, 21 and 23 use as unit of the response “% lokivetmab binding” which was calculated based on the highest readout of “mOD405/min” for the preimmune serum of day 0.

[0558] FIGS. 24 to 29 depict the results of the ELISA using cIL-31 polyprotein as antigen for the mixture comprising dog serum from day 42 after immunization and 100 ng/ml biotinylated lokivetmab. While in FIGS. 24, 26 and 28 the unit of the response is “mOD405/min” and thus the direct readout from the reporter response, FIGS. 25, 27 and 29 use as unit of the response “% lokivetmab binding” which was calculated based on the highest readout of “mOD405/min” for the preimmune serum of day 0.

[0559] The preimmune serum of dogs showed some inhibitory activity against lokivetmab binding to cIL-31, but this effect was much weaker compared to the inhibitory activity of the dog serum obtained 42 days after immunization and was limited to 40-70% at a 1:2 dilution. It appears likely that this reflects the presence of cIL-31 cytokine autoantibodies in dogs, as described previously in humans for a variety of cytokines such as interferon alpha and gamma, tumor necrosis factor alpha, interleukins 1 beta and 10, and others (Bendtzen et al., “High-avidity autoantibodies to cytokines”, Immunology today 19.5 (1998): 209-211).

[0560] The neutralizing activity, however, was greatly increased by immunization with cIL-31 polyprotein. Serum samples from day 42 of all three dogs, immunized according to the regimen described in Example 13, contained antibodies that suppressed lokivetmab binding to cIL-31 by 95% when diluted 1:2 (see FIGS. 21 to 26). This inhibition became less pronounced when the serum samples were diluted further (titration), but at 1:16 dilutions a partial effect was still visible in all three dogs.

[0561] Similar results were obtained when cIL-31 poly was used as a lokivetmab binding agent (FIGS. 24 to 29).

[0562] Since lokivetmab is a cIL-31 neutralizing antibody, the successful induction of lokivetmab-competing autoantibodies with the described cIL-31 polyprotein immunization scheme indicates a clear potential that the autoantibodies can neutralize cIL-31 function in dogs.

[0563] As the therapeutic action of lokivetmab is well-established, it can be expected that the lokivetmab-competing autoantibodies induced in the host according to the invention will show similar therapeutic efficacy.

### Example 16: Second Immunization Study Using the Vaccine Formulation of Example 13

[0564] In a second immunization study dogs suffering from pruritus were immunized by subcutaneous injections with the vaccine formulation according to Example 13 as follows:
[0565] Day −7: challenge with cIL-31 (1.75 μg/kg bw intravenous injection for baseline evaluation)
[0566] Day 0: primary subcutaneous immunization with the cIL-31 polyprotein vaccine as defined in Example 13. Before the primary immunization, a preimmune blood sample was taken from all tested dogs.
[0567] Day 6: collection of a blood sample
[0568] Day 14: collection of a blood sample
[0569] Day 21: collection of a blood sample and challenge with cIL-31 (1.75 μg/kg intravenous injection cIL-31)
[0570] Day 28: first subcutaneous booster immunization with the cIL-31 polyprotein vaccine and collection of a blood sample
[0571] Day 35: collection of a blood sample
[0572] Day 42: challenge with cIL-31 (1.75 μg/kg intravenous injection cIL-31) and collection of a blood sample
[0573] Day 49: collection of a blood sample
[0574] Day 56: collection of a blood sample
[0575] Day 63: challenge with cIL-31 (0.85 μg/kg intravenous injection cIL-31) and collection of a blood sample
[0576] Day 70: collection of a blood sample
[0577] Day 77: collection of blood sample
[0578] Day 84: second subcutaneous booster immunization with the cIL-31 polyprotein vaccine and collection of blood sample
[0579] Day 91: collection of blood sample
[0580] Day 98: challenge with cIL-31 (0.85 μg/kg intravenous injection cIL-31) and collection of blood sample
[0581] Day 105: collection of blood sample
[0582] Day 112: collection of blood sample
[0583] Day 119: collection of blood sample
[0584] Day 126: collection of blood sample

[0585] During the booster immunizations on days 28 and 84, the tested dogs received again the vaccine formulation according to Example 13.

[0586] The serum samples were analyzed with an ELISA assay as described in Example 14 using cIL-31 as coating antigen. Serial dilutions of the dog sera from 1:20 to 1:20480 were used. FIGS. 30a-b to 37a-b depict the results of these ELISAs and show that the immunized dogs produced anti-cIL-31 antibodies in considerable amounts. The booster immunizations at day 28 led to an increase in anti-cIL-31 antibody titers in the tested dogs. High anti-cIL-31 antibody titers were still observed beyond day 42. Only a partial loss of anti-cIL-31 antibody titers occurred in the tested dogs up to the second booster immunization. Taken together, these results show the successful breakage of self-tolerance against cIL-31 in the tested dogs.

[0587] The dogs subjected to the above-described immunization scheme were analyzed for the presence of any pruritic behavior as described in Example 4 at different time points of the immunization scheme: before the begin of immunization study (day −7), three weeks after the first immunization (day 21), two weeks after the first boost (day 42), five weeks after the first boost (day 63) and two weeks after the second boost (day 98). Exemplary results of pruritic behavior analysis from three tested dogs are depicted in FIG. 38. The results of FIG. 38 demonstrate that the pruritus scores can be decreased by the applied immunization scheme and thus provide proof-of-concept for a successful prophylactic/therapeutic vaccine treatment using a vaccine composition according to the invention.

### Example 17: Vaccine Formulation Using mRNA to Encode the Polyprotein According to the Invention

[0588] In recent years vaccination with mRNA has gained increasing attention due to the fact that the production of mRNA vaccines is rather simple. For such vaccines, the steps of expressing and purifying the protein antigen are no longer necessary, which are often bottlenecks in terms of cost and speed of vaccine production (see Zhang C, Maruggi G, Shan H, Li J. Advances in mRNA Vaccines for Infectious Diseases. Front Immunol. 2019 Mar. 27; 10:594. doi: 10.3389/fimmu.2019.00594. eCollection 2019.). mRNA vaccines rely on the production of the antigen by the host's own cells based on the mRNA introduced.

[0589] It is conceivable that the vaccination of dogs against its own IL-31 can also be achieved with a vaccine containing an mRNA encoding for the polyprotein of the invention. This could be achieved as follows:

[0590] The cIL-31-poly construct described in Example 1 is transferred into an in vitro transcription vector. To this aim, the insert encoding cIL-31-poly is cloned from pcDNA3.4 into pcDNA3.1(+) using the restriction enzymes EcoRI and HindIII. pcDNA3.1(+) possesses a T7 RNA polymerase promoter upstream the EcoRI cloning site. To make the production of capped run-off RNA transcripts from this vector possible, the pcDNA3.1(+)-cIL-31-poly vector is linearized 3′ of the insert. In vitro transcription is then performed using T7-RNA polymerase in the presence of cap nucleotides, the four canonical dNTP and/or noncanonical dNTPs to modify transcript properties. In the next step, the obtained run-off transcripts are polyadenylated by using a Poly-A polymerase. Alternatively, it is also possible to include a poly-dT tail in the cIL-31-poly construct 3′ of the stop codon.

[0591] The capped and polyadenylated mRNA can then be used for vaccination. Dogs could receive mRNA amounts of 1 μg to 1 mg, more preferably 10 μg to 300 μg, e.g., by injecting naked mRNA together with the remaining components of the claimed vaccine composition intramuscularly, subcutaneously or intradermally or with a gene gun. It is also possible to inject the mRNA encoding for the polyprotein together with the remaining components of the claimed vaccine composition in form of a liposomal formulation, in form of a formulation comprising complexes with cationic proteins, cationic polymers or cationic cell penetrating peptides or in other forms which enhance halflife, cellular upatake and translatability of the introduced mRNA.

[0592] The mRNA injection is then repeated in 2-6 week intervals. The presence of anti-cIL-31 antibodies can be assessed as described in Example 14.

[0593] Generally, it is also possible to encode the cIL-31-poly construct by a self-replicating mRNA, e.g., by an alpha virus derived self-replicating mRNA. The use of self-replicating mRNA could have the advantage that a longer protein production is achieved from the RNA construct upon administration to the host so that also higher anti-cIL-31 antibodies titers could be obtained.

### Example 18: Vaccine Formulation Using DNA to Encode the Polyprotein According to the Invention

[0594] DNA vaccines contain DNA, usually plasmid DNA. Plasmid DNA is often administered to the host in naked form via injection or gene gun. It is however, also possible to deliver the plasmid DNA to the host as, e.g., lipoplex with cationic lipids, as liposomal formulation or as complex with cationic polymers. Sometimes the DNA is also encapsulated in a protein shell akin to a virus, which ensures efficient uptake by cells. (for review: Ghaffarifar F. Plasmid DNA vaccines: where are we now? Drugs Today (Barc). 2018 May; 54(5):315-333. doi: 10.1358/dot.2018.54.5.2807864).

[0595] It is conceivable that the vaccination of dogs against one of its own self-proteins, e.g. against a cytokine, in particular an interleukin preferably derived from IL-31 can also be achieved with a vaccine containing DNA encoding for the polyprotein of the invention.

[0596] As an example, it is conceivable that the vaccination of dogs against its own IL-31 can also be achieved with a vaccine containing DNA encoding for the polyprotein of the invention. This could be achieved as follows:

[0597] The cIL-31-poly construct described in Example 1a is transferred into an mammalian expression vector. To this aim, the insert encoding cIL-31-poly is cloned from pcDNA3.4 into pcDNA3.1(+) using the restriction enzymes EcoRI and HindIII. pcDNA3.1(+) possesses all elements necessary for expression of cIL-31-poly in the host cells: a strong mammalian promoter in form of a human cytomegalovirus immediate-early (CMV) promoter and a strong polyadenylation/termination signal in form of the bovine growth hormone BGH gene.

[0598] Dogs could receive highly purified pcDNA3.1(+)-cIL-31-poly (LPS-free) in amounts of 10 μg to 3 mg, more preferably 50 μg to 1000 μg, e.g., by injecting naked plasmid DNA together with the remaining components of the claimed vaccine composition intramuscularly, subcutaneously or intradermally or with a gene gun. It is also possible to inject the plasmid DNA encoding for the polyprotein together with the remaining components of the claimed vaccine composition in form of a liposomal formulation, in form of a formulation comprising complexes with cationic proteins, cationic polymers or cationic cell penetrating peptides or in other forms which enhance halflife, cellular upatake and translatability of the introduced mRNA.

[0599] The plasmid DNA injection is then repeated in 2-6 week intervals. The presence of anti-cIL-31 antibodies can be assessed as described in Example 14a.

[0600] Analagous protocols are envisioned for the other interleukins, in particular for those exemplified herein (e.g. IL-4, IL-5, IL-13, IL-33-CS, and TNF-alpha).

### Example 19a: Neutralization Assay of cIL-13 Signal Transduction Using a Specific Rabbit Anti-cIL-13 Serum

[0601] HEKBlue IL4/IL13 (Invivogen, hek-il413) were grown in DMEM (Thermo Fisher, 616965-026), 10% iFCS, at 37° C., 5% CO₂. For selection purposes, culture medium was supplemented with 10 μg/ml blasticidin (Invivogen, ant-bl-5b) and 100 μg/ml zeocin (Invivogen, ant-zn-5).

[0602] Dilution of rabbit anti-cIL-13 serum (Example 6a) was performed in 40 μl full growth medium in a 384 well cell culture plate supplemented with 10 ng/ml cIL-13 and incubated for 1 h. HEKBlue IL4/IL13 cells were harvested, adjusted to 2.2×10⁵ cells/mL in full growth medium, and 40 μl cell suspension were added to each of the sera dilutions. The cells were incubated at 37° C., 5% (v/v) CO₂ for 96 h. Cell culture supernatant samples were used for measurement of alkaline phosphatase (SEAP) activity by adding them to 5 mM para-nitrophenyl phosphate (pNPP) in AP buffer (50 mM NaHCO₃/Na₂CO₃, 2 mM MgCl₂, pH 9.6), 90 μl/well for 384 well plates. Measurement of the optical density (OD) at 405 nm at RT in an ELISA reader in a kinetic mode (mOD/min) by determining the curve slope in a linear area (=mOD405 nm/min), or in an endpoint mode (OD) by determining the optical density at a fixed time point.

[0603] The ELISA results of the rabbit cIL-13 antiserum's neutralization effect on HEKBlue IL4/IL13 cells are depicted in FIG. 55. The rabbit cIL-13 antiserum inhibited the cIL-13 stimulation of HEKBlue IL-4/IL-13 cells, already starting at a dilution of 1:320. Complete inhibition was achieved at a dilution of 1:20. This experiment established an antibody neutralization assay of cIL-13's biological effect.

### Example 19b: Neutralization Assay of cIL-13 Signal Transduction Using Preimmune and Anti-cIL-13 Dog Sera

[0604] The same neutralization assay of Example 19a was performed on sera from three dogs (Dogs 0521, 2579, and 6048) collected on Day 0 (preimmune, SD-1), and on Day 42 of the cIL-13-poly vaccination study of Example 14c. The ELISA results are depicted in FIG. 56A-C.

[0605] While dilutions of preimmune sera (“SD-1”) did not lead to a decrease in cIL-13 signal strength in HEKBlue IL-4/IL-13 cells, Day 42 cIL-13-poly antisera from all three dogs led to a complete suppression of the signal at 1:320, 1:20 and 1:40 dilutions, respectively, and titration curves of inhibition following these dilutions (see FIGS. 56A-C).

### Example 19c: Neutralization Assay of cIL-4 Signal Transduction Using Preimmune and Anti-cIL-4 Dog Sera

[0606] IL-4 is known to induce expression of thymus- and activation-regulated chemokine (TARC or CCL17) at the mRNA and protein level and in dogs an upregulation of TARC in atopic dermatitis has been documented. Therefore, TARC was used as a positive marker (strong mRNA upregulation) of canine blood exposure to IL-4.

[0607] The inhibition of TARC mRNA upregulation was assessed to probe for the presence of neutralizing antibodies following the cIL-4-poly vaccination as follows: EDTA-stabilized blood samples were taken from the IL-4-poly-immunized animals (Dog 5365, Dog 6523 and Dog 7104) at day 49 (2 weeks into the booster immunization) and blood samples were pooled from control animals. 500 μl of blood was supplemented with cIL-4 (R&D systems, 754-CL-025/CF) to 1 ng/ml, and the blood was then incubated for 6 h at 35° C., 5% CO₂ and 96% relative humidity. Blood lysis and RNA stabilization was done with RNAprotect Animal Blood Tubes 500 μl (Qiagen 76554) and an incubation for 2 h at room temperature.

[0608] RNA was then isolated using the RNeasy Protect Animal Blood Kit (Qiagen 73224). Isolated RNA was analysed and quantified using an Implen NanoPhotometer®, type NP80. Quantitative RT-PCR (qPCR) was performed with the TaqMan® Assay Cf02622128_m1 (Thermo) with probe and primers for canine CCL-17 (TARC) and the QuantiNova Probe RT-PCR Kit (Qiagen 208354), with the primers, reaction mixtures and conditions outlined by the manufacturers. Homemade canine β-actin TaqMan probe and PCR primers were used as a housekeeping gene control. Typically 25 ng total RNA was used as template. The qPCR was performed using a CFX96 Real-Time System (BioRad).

[0609] Results of the experiments are depicted in FIG. 73.

[0610] The pooled blood of control dogs was highly responsive to the incubation with 1 ng/ml cIL-4 with respect to TARC/CCL-17 mRNA induction (see ΔΔCq in FIG. 73A). By contrast, all three dogs vaccinated with cIL-4-poly had a strongly suppressed TARC/CCL-17 mRNA induction in cIL-4 incubation, an inhibition apparently complete for all three dogs in a linear scale graph (FIG. 73A). In a log scale graph, inhibition of cIL-4-induced TARC mRNA production exceeds 99.99% for dogs 5365 and 7104, and 99% for dog 6523 (FIG. 73B). Some minor background mRNA expression of TARC in the absence of cIL-4 stimulation was detected in all dogs (FIG. 73B, condition “w/o”).

[0611] Taken together, the data demonstrate that self tolerance to cIL-4 was broken in all three dogs immunized with cIL-4-poly vaccine, and antibody titers against native cIL-4 were present. These antibodies possess neutralizing potential in cell culture assay systems for cIL-4 action, and are neutralizing to cIL-4 added in an ex vivo blood assay of the immunized dogs.

### BRIEF DESCRIPTION OF THE DRAWINGS

[0612] FIG. 1 depicts an embodiment of the polyprotein according to the invention. The N-terminus of the polyprotein begins with an artificial signal sequence for ER-import to allow expression in HEK 293 cells. This is followed by a first copy of mature canine IL-31 (SEQ ID NO: 3). After this first copy of mature canine IL-31, the Tetanus toxin p2 T-cell epitope (amino acids 1273-1284 of the tetanus toxin, SEQ ID NO: 1) is included, followed by a second copy of mature canine IL-31. After this second copy of mature canine IL-31, the Tetanus toxin p30 T-cell epitope (amino acids 947-968 of the tetanus toxin, SEQ ID NO: 2) is attached, followed by a third copy of mature canine IL-31. Thereafter, two Tetanus toxin T-cell epitopes (p30 and p2) are included. These two Tetanus toxin T-cell epitopes are followed by a His-tag for protein purification.

[0613] FIG. 2 depicts a plasmid map of the vector pcDNA3.4-cIL31-poly which encodes the cIL-31 polyprotein according to FIG. 1.

[0614] FIG. 3 depicts the results of the SDS-PAGE analysis with Coomassie Blue staining of cIL-31-poly, which are further explained in Example 2. Lane M1 depicts the protein marker (TaKaRa, Cat. No. 3452). Lane 1 depicts the size of the cIL-31 polyprotein under reducing conditions and lane 2 under non-reducing conditions.

[0615] FIG. 4 depicts the results of the SDS-PAGE analysis with Coomassie Blue staining of cIL-31, which are further explained in Example 3. Lane M1 depicts the protein marker (TaKaRa, Cat. No. 3452). Lane 1 depicts the size of the cIL-31 protein under reducing conditions and lane 2 under non-reducing conditions.

[0616] FIG. 5 depicts the results of the ELISA using cIL-31 or cIL-31 polyprotein as ELISA plate coating antigen for the rabbit preimmune serum and antiserum raised against cIL-31. These results are further explained in Example 8.

[0617] FIG. 6 depicts the results of the ELISA using cIL-31 or cIL-31 polyprotein as ELISA plate coating antigen for the chicken egg yolk preparation raised against cIL-31. These results are further explained in Example 8.

[0618] FIG. 7 depicts the results of the ELISA using cIL-31 as ELISA plate coating antigen for lokivetmab which are further explained in Example 9.

[0619] FIG. 8 depicts the results of the ELISA using cIL-31 and cIL-31 polyprotein as ELISA plate coating antigens for lokivetmab. These results are further explained in Example 9.

[0620] FIG. 9 depicts the results of the ELISA using cIL-31 as ELISA plate coating antigen for biotinylated lokivetmab. These results are further explained in Example 10.

[0621] FIG. 10 depicts the results of the ELISA using cIL-31 as ELISA plate coating antigen for the mixture of rabbit preimmune serum+biotinylated lokivetmab or the mixture of rabbit immune serum+biotinylated lokivetmab to probe for the interaction between biotinylated lokivetmab as cIL-31 neutralizing antibody and cIL-31 immobilized on an ELISA plate. These results are further explained in Example 11.

[0622] FIG. 11 depicts the results of the ELISA using cIL-31 polyprotein as ELISA plate coating antigen for the mixture of rabbit preimmune serum+biotinylated lokivetmab or the mixture of rabbit immune serum+biotinylated lokivetmab to probe for the interaction between biotinylated lokivetmab as cIL-31 neutralizing antibody and cIL-31 polyprotein immobilized on an ELISA plate. These results are further explained in Example 11.

[0623] FIG. 12 depicts the results of the ELISA using cIL-31 as ELISA plate coating antigen for the mixture of chicken egg yolk IgY preparation+biotinylated lokivetmab to probe for the interaction between lokivetmab as cIL-31 neutralizing antibody and cIL-31 immobilized on an ELISA plate. These results are further explained in Example 11.

[0624] FIG. 13 depicts a plasmid map of the construct pcDNA3.1(+)-bsd-NFkB-SEAP in which
[0625] 181 bp-448 bp encode for five NFkB binding sites followed by a minimal ELAM promoter (NFkB-5-ELAM)
[0626] 454 bp-2022 bp encode for the SEAP gene as NFkB reporter gene
[0627] 3214 bp-3613 bp encode for the Blasticidin resistance gene (bsd-R) to allow for eukaryotic cell selection
[0628] 5961 bp-5100 bp encode for the Ampicillin resistance gene (amp-R) to allow for E. coli selection

[0629] FIG. 14 depicts the results of NFkB signal activation upon treatment of the clonal cell line DH82-bsd-NFSEAP with PTO-ODNs. These results are further described in Example 12.

[0630] FIGS. 15a-c depict the results of the ELISA using cIL-31 as ELISA plate coating antigen for dog sera of animal 4315 at different sampling time points. These results are further explained in Example 14.

[0631] FIGS. 16a-c depict the results of the ELISA using cIL-31 as ELISA plate coating antigen for dog sera of animal 6962 at different sampling time points. These results are further explained in Example 14.

[0632] FIGS. 17a-c depict the results of the ELISA using cIL-31 as ELISA plate coating antigen for dog sera of animal 8523 at different sampling time points. These results are further explained in Example 14.

[0633] FIG. 18 depicts the results of the ELISA using cIL-31 as ELISA plate coating antigen for the mixture comprising serum from day 42 after immunization of dog 4315 and 100 ng/ml biotinylated lokivetmab. The unit of the response is indicated as “mOD405/min” and thus the direct readout from the reporter response. These results are further explained in Example 15.

[0634] FIG. 19 depicts the results of the ELISA using cIL-31 as ELISA plate coating antigen for the mixture comprising serum from day 42 after immunization of dog 4315 and 100 ng/ml biotinylated lokivetmab. The unit of the response is indicated as “% lokivetmab binding” which was calculated based on the highest readout of “mOD405/min” for the preimmune serum of day 0. These results are further explained in Example 15.

[0635] FIG. 20 depicts the results of the ELISA using cIL-31 as ELISA plate coating antigen for the mixture comprising serum from day 42 after immunization of dog 6962 and 100 ng/ml biotinylated lokivetmab. The unit of the response is indicated as “mOD405/min” and thus the direct readout from the reporter response. These results are further explained in Example 15.

[0636] FIG. 21 depicts the results of the ELISA using cIL-31 as ELISA plate coating antigen for the mixture comprising serum from day 42 after immunization of dog 6962 and 100 ng/ml biotinylated lokivetmab. The unit of the response is indicated as “% lokivetmab binding” which was calculated based on the highest readout of “mOD405/min” for the preimmune serum of day 0. These results are further explained in Example 15.

[0637] FIG. 22 depicts the results of the ELISA using cIL-31 as ELISA plate coating antigen for the mixture comprising serum from day 42 after immunization of dog 8523 and 100 ng/ml biotinylated lokivetmab. The unit of the response is indicated as “mOD405/min” and thus the direct readout from the reporter response. These results are further explained in Example 15.

[0638] FIG. 23 depicts the results of the ELISA using cIL-31 as ELISA plate coating antigen for the mixture comprising serum from day 42 after immunization of dog 8523 and 100 ng/ml biotinylated lokivetmab. The unit of the response is indicated as “% lokivetmab binding” which was calculated based on the highest readout of “mOD405/min” for the preimmune serum of day 0. These results are further explained in Example 15.

[0639] FIG. 24 depicts the results of the ELISA using cIL-31 polyprotein as ELISA plate coating antigen for the mixture comprising serum from day 42 after immunization of dog 4315 and 100 ng/ml biotinylated lokivetmab. The unit of the response is indicated as “mOD405/min” and thus the direct readout from the reporter response. These results are further explained in Example 15.

[0640] FIG. 25 depicts the results of the ELISA using cIL-31 polyprotein as ELISA plate coating antigen for the mixture comprising serum from day 42 after immunization of dog 4315 and 100 ng/ml biotinylated lokivetmab. The unit of the response is indicated as “% lokivetmab binding” which was calculated based on the highest readout of “mOD405/min” for the preimmune serum of day 0. These results are further explained in Example 15.

[0641] FIG. 26 depicts the results of the ELISA using cIL-31 polyprotein as ELISA plate coating antigen for the mixture comprising serum from day 42 after immunization of dog 6962 and 100 ng/ml biotinylated lokivetmab. The unit of the response is indicated as “mOD405/min” and thus the direct readout from the reporter response. These results are further explained in Example 15.

[0642] FIG. 27 depicts the results of the ELISA using cIL-31 polyprotein as ELISA plate coating antigen for the mixture comprising serum from day 42 after immunization of dog 6962 and 100 ng/ml biotinylated lokivetmab. The unit of the response is indicated as “% lokivetmab binding” which was calculated based on the highest readout of “mOD405/min” for the preimmune serum of day 0. These results are further explained in Example 15.

[0643] FIG. 28 depicts the results of the ELISA using cIL-31 polyprotein as ELISA plate coating antigen for the mixture comprising serum from day 42 after immunization of dog 8523 and 100 ng/ml biotinylated lokivetmab. The unit of the response is indicated as “mOD405/min” and thus the direct readout from the reporter response. These results are further explained in Example 15.

[0644] FIG. 29 depicts the results of the ELISA using cIL-31 polyprotein as ELISA plate coating antigen for the mixture comprising serum from day 42 after immunization of dog 8523 and 100 ng/ml biotinylated lokivetmab. The unit of the response is indicated as “% lokivetmab binding” which was calculated based on the highest readout of “mOD405/min” for the preimmune serum of day 0. These results are further explained in Example 15.

[0645] FIGS. 30a-b depict the results of the ELISA using cIL-31 as ELISA plate coating antigen for dog sera of animal 1672 at different sampling time points. These results are further explained in Example 16.

[0646] FIGS. 31a-b depict the results of the ELISA using cIL-31 as ELISA plate coating antigen for dog sera of animal 5096 at different sampling time points. These results are further explained in Example 16.

[0647] FIGS. 32a-b depict the results of the ELISA using cIL-31 as ELISA plate coating antigen for dog sera of animal 5583 at different sampling time points. These results are further explained in Example 16.

[0648] FIGS. 33a-b depict the results of the ELISA using cIL-31 as ELISA plate coating antigen for dog sera of animal 7918 at different sampling time points. These results are further explained in Example 16.

[0649] FIGS. 34a-b depict the results of the ELISA using cIL-31 as ELISA plate coating antigen for dog sera of animal 9351 at different sampling time points. These results are further explained in Example 16.

[0650] FIGS. 35a-b depict the results of the ELISA using cIL-31 as ELISA plate coating antigen for dog sera of animal 8779 at different sampling time points. These results are further explained in Example 16.

[0651] FIGS. 36a-b depict the results of the ELISA using cIL-31 as ELISA plate coating antigen for dog sera of animal 1368 at different sampling time points. These results are further explained in Example 16.

[0652] FIGS. 37a-b depict the results of the ELISA using cIL-31 as ELISA plate coating antigen for dog sera of animal 3432 at different sampling time points. These results are further explained in Example 16.

[0653] FIG. 38 depicts exemplary results of a pruritic behavior analysis of three tested dogs which were subjected to the immunization scheme described in Example 16. The results are further explained in Example 16.

[0654] FIG. 39 depicts an embodiment of the polyprotein according to the invention. The N-terminus of the polyprotein begins with an artificial signal sequence for ER-import to allow expression in HEK 293 cells. This is followed by a first copy of mature canine IL-5 (SEQ ID NO: 41). After this first copy of mature canine IL-5, the Tetanus toxin p2 T-cell epitope (amino acids 1273-1284 of the tetanus toxin, SEQ ID NO: 1) is included, followed by a second copy of mature canine IL-5. After this second copy of mature canine IL-5, the Tetanus toxin p30 T-cell epitope (amino acids 947-968 of the tetanus toxin, SEQ ID NO: 2) is attached, followed by a third copy of mature canine IL-5. Thereafter, two Tetanus toxin T-cell epitopes (p30 and p2) are included. These two Tetanus toxin T-cell epitopes are followed by a His₆-tag for protein purification.

[0655] FIG. 40 depicts a plasmid map of the vector pcDNA3.4-cIL-5-poly, which encodes the cIL-5 polyprotein according to FIG. 39.

[0656] FIG. 41 depicts the results of the SDS-PAGE analysis with Coomassie Blue staining of cIL-5-poly, which are further explained in Example 2b. Lane “M2” depicts the protein marker (GenScript, Cat. No. M00521). Lane “R” depicts the size of the cIL-5 polyprotein under reducing conditions and lane “NR” under non-reducing conditions. Lane “P” depicts the multiple-tag protein (GenScript, Cat. No. M0101) as a positive control. The primary antibody was mouse-anti-His₆ mAb (GenScript, Cat. No. A00186).

[0657] FIG. 42 depicts a plasmid map of the vector pcDNA3.4-cIL-5, which encodes the cIL-5 protein.

[0658] FIG. 43 depicts the results of the SDS-PAGE analysis with Coomassie Blue staining of cIL-5, which are further explained in Example 3b. Lane M1 depicts the protein marker (TaKaRa, Cat. No. 3452). Lane 1 depicts the size of the cIL-5 protein under reducing conditions and lane 2 under non-reducing conditions.

[0659] FIG. 44 depicts the titer determination results of the ELISA using cIL-5 as ELISA plate coating antigen for the rabbit preimmune serum and antiserum raised against cIL-5. These results are further explained in Example 8b.

[0660] FIG. 45 depicts the results of the ELISA using cIL-5 or cIL-5 polyprotein as ELISA plate coating antigen for the rabbit preimmune serum and antiserum raised against cIL-5. These results are further explained in Example 8b.

[0661] FIGS. 46A-F depict the results of the ELISA at different sampling time points using cIL-5 as ELISA plate coating antigen for dog sera of animal “Dog 1” in FIGS. 46A and 46B, of animal “Dog 2” in FIGS. 46C and 46D, and of animal “Dog 3” in FIGS. 46E and 46F. These results are further explained in Example 14b.

[0662] FIG. 47 depicts an embodiment of the polyprotein according to the invention. The N-terminus of the polyprotein begins with an artificial signal sequence for ER-import to allow expression in HEK 293 cells. This is followed by a first copy of mature canine IL-13 (SEQ ID NO: 46). After this first copy of mature canine IL-13, the Tetanus toxin p2 T-cell epitope (amino acids 1273-1284 of the tetanus toxin, SEQ ID NO: 1) is included, followed by a second copy of mature canine IL-13. After this second copy of mature canine IL-13, the Tetanus toxin p30 T-cell epitope (amino acids 947-968 of the tetanus toxin, SEQ ID NO: 2) is attached, followed by a third copy of mature canine IL-13. Thereafter, two Tetanus toxin T-cell epitopes (p30 and p2) are included. These two Tetanus toxin T-cell epitopes are followed by a His₆-tag for protein purification.

[0663] FIG. 48 depicts a plasmid map of the vector pcDNA3.4-cIL-13, which encodes the cIL-13 protein.

[0664] FIG. 49 depicts the results of the SDS-PAGE analysis with Coomassie Blue staining of cIL-13-poly, which are further explained in Example 2b. Lane M1 depicts the protein marker (TaKaRa, Cat. No. 3452). Lane 1 depicts the size of the cIL-13 polyprotein under reducing conditions and lane 2 under non-reducing conditions.

[0665] FIG. 50 depicts a plasmid map of the vector pET30a-cIL-13, which encodes the cIL-13 protein.

[0666] FIG. 51 depicts the results of the SDS-PAGE analysis with Coomassie Blue staining of cIL-13, which are further explained in Example 3c. Lane M1 depicts the protein marker (TaKaRa, Cat. No. 3452). Lane 1 depicts the size of bovine serum albumin (BSA, 2 μg). Lane 2 depicts the size of the cIL-13 protein (1.86 μg).

[0667] FIG. 52 depicts the results of HEKBlue IL-4/IL-13 cell stimulation by cIL-13, based on SEAP reporter gene readout. These results are further described in Example 12b.

[0668] FIG. 53 depicts the results of the ELISA using cIL-13 protein (A) or cIL-13 polyprotein (B) as ELISA plate coating antigen for the rabbit preimmune serum (open symbols) and antiserum (closed symbols) raised against cIL-13. These results are further explained in Example 8c.

[0669] FIG. 54A-C depict the results of the ELISA at different sampling time points using cIL-13 as ELISA plate coating antigen for dog sera of animal “Dog 0521” (A), animal “Dog 2579” (B), and of animal “Dog 6048” (C). These results are further explained in Example 14c.

[0670] FIG. 55 depicts the results cIL-13 stimulation of HEKBlue IL-4/IL-13 cells treated with rabbit anti-cIL-13 serum. These results are further described in Example 19a.

[0671] FIG. 56A-C depicts the results cIL-13 stimulation of HEKBlue IL-4/IL-13 cells treated with dog serum collected from Dog 0521 (A), Dog 3579 (B), and Dog 6048 (C) either at Day 0 (preimmune, open symbols, “SD-1”) or Day 42 (closed symbols, “SD42”) following immunization with cIL-13-poly. These results are further described in Example 19b.

[0672] FIG. 57 depicts a plasmid map of the vector pET30a (+)-canIL33-WT, which encodes the cIL-33-WT protein.

[0673] FIG. 58 depicts the results of the SDS-PAGE analysis with Coomassie Blue staining of cIL-33-WT, which are further explained in Example 3d. Lane M1 depicts the protein marker (TaKaRa, Cat. No. 3452). Lane 1 depicts the size of bovine serum albumin (BSA). Lane 2 depicts the size of the cIL-33-WT protein under reducing conditions.

[0674] FIG. 59 depicts the results of the ELISA using cIL-33-WT protein as ELISA plate coating antigen for the rabbit preimmune serum (open symbols) and antiserum (closed symbols) raised against cIL-33-WT. These results are further explained in Example 8d.

[0675] FIG. 60 depicts a plasmid map of the vector pET30a-canIL33-CS, which encodes the CIL-33-CS protein.

[0676] FIG. 61 depicts the results of the SDS-PAGE analysis with Coomassie Blue staining of cIL-33-CS, which are further explained in Example 3e. Lane M1 depicts the protein marker (TaKaRa, Cat. No. 3452). Lane 1 depicts the size of bovine serum albumin (BSA). Lane 2 depicts the size of the cIL-33-CS protein under reducing conditions.

[0677] FIG. 62 depicts the results of HEKBlue IL-4/IL-13 cell stimulation by different forms of cIL-33, based on SEAP reporter gene readout. The different forms used are IL-33-WT-NovoPro (https://novoprolabs.com/p/human-il33-c9orf26-il1f11-nfhev-519146.html; open circles), cIL-33-WT Batch1 (closed triangles), cIL-33-WT Batch2 (closed squares), and cIL-33-CS (closed circles). These results are further described in Example 12c.

[0678] FIG. 63 depicts an embodiment of the polyprotein according to the invention. The N-terminus of the polyprotein begins with a start methionine and the His₆ tag to allow expression in E. coli cells. This is followed by a first copy of mature canine IL-33 (meaning cIL-33-CS; SEQ ID NO: 51). After this first copy of mature canine IL-33-CS, the Tetanus toxin p2 T-cell epitope (amino acids 1273-1284 of the tetanus toxin, SEQ ID NO: 1) is included, followed by a second copy of mature canine IL-33-CS. After this second copy of mature canine IL-33-CS, the Tetanus toxin p30 T-cell epitope (amino acids 947-968 of the tetanus toxin, SEQ ID NO: 2) is attached, followed by a third copy of mature canine IL-33-CS. Thereafter, two Tetanus toxin T-cell epitopes (p30 and p2) are included.

[0679] FIG. 64 depicts a plasmid map of the vector pET30a-cIL33-poly, which encodes the cIL-33-CS protein.

[0680] FIG. 65 depicts the results of the SDS-PAGE analysis with Coomassie Blue staining of cIL-33-CS-poly (also referred to here as cIL-33-poly), which are further explained in Example 2d. Lane M1 depicts the protein marker (TaKaRa, Cat. No. 3452). Lane 1 depicts the size of the cIL-33-CS polyprotein under reducing conditions and lane 2 under non-reducing conditions.

[0681] FIG. 66 depicts the results of the ELISA using cIL-33-CS polyprotein as ELISA plate coating antigen for the rabbit preimmune serum (open symbols) and antiserum (closed symbols) raised against cIL-33-WT. These results are further explained in Example 8d.

[0682] FIG. 67 depicts the results of the ELISA at different sampling time points using cIL-33-WT as ELISA plate coating antigen for dog sera of animal “Dog 402”, which was immunized using cIL-33-CS polyprotein. Time points are Preimmune serum (open circles), Day 28 post immunization (open squares), Day 35 post immunization (closed circles), Day 42 post immunization (closed squares); Day 49 post immunization (closed triangles); Day 56 post immunization (closed diamonds); Day 63 post immunization (open triangles). These results are further explained in Example 14d.

[0683] FIG. 68 depicts an embodiment of the polyprotein according to the invention (SEQ ID NO: 57). The N-terminus of the polyprotein begins with an artificial signal sequence for ER-import to allow expression in HEK 293 cells. This is followed by a first copy of mature canine IL-4 (SEQ ID NO: 56). After this first copy of mature canine IL-4, the Tetanus toxin p2 T-cell epitope (amino acids 1273-1284 of the tetanus toxin, SEQ ID NO: 1) is included, followed by a second copy of mature canine IL-4. After this second copy of mature canine IL-4, the Tetanus toxin p30 T-cell epitope (amino acids 947-968 of the tetanus toxin, SEQ ID NO: 2) is attached, followed by a third copy of mature canine IL-4. Thereafter, two Tetanus toxin T-cell epitopes (p30 and p2) are included. These two Tetanus toxin T-cell epitopes are followed by a His₆-tag for protein purification.

[0684] FIG. 69 depicts a plasmid map of the vector pcDNA3.4-cIL-4, which encodes the cIL-4 protein.

[0685] FIG. 70 depicts a plasmid map of the vector pET30a-cIL-4, which encodes the cIL-4 protein.

[0686] FIG. 71 depicts the results of the ELISA using cIL-4 protein (A) or cIL-4 polyprotein (B) as ELISA plate coating antigen for the rabbit preimmune serum (circles) and antiserum (triangles) raised against cIL-4. The results using cIL-4-polyprotein as the coating antigen for rabbit antiserum raised against cIL-13 (squares) are also shown. These results are further explained in Example 8e.

[0687] FIG. 72A-C depict the results of the ELISA at different sampling time points using cIL-4 as ELISA plate coating antigen for dog sera of animal “Dog 5365” (A), animal “Dog 6523” (B), and of animal “Dog 7104” (C). These results are further explained in Example 14e.

[0688] FIG. 73 depicts the qPCR results for TARC mRNA expression following cIL-4 stimulation (“+IL4”) of EDTA-stabilized blood taken from the three IL-4-poly-immunized dogs (Dog 5365, Dog 6523 and Dog 7104 as in FIG. 72) at day 49, or of a pooled blood sample from control dogs with no vaccine exposure (“Pooled naïve blood”). AACq values are given on a linear (A) or logo scale (B) for better visualization of low values. “w/o” indicates blood samples incubated and processed in the same way, but having not received cIL-4.). The results are further described in Example 19c.

[0689] FIG. 74 depicts an embodiment of the polyprotein according to the invention. The N-terminus of the polyprotein begins with an artificial signal sequence for ER-import to allow expression in HEK 293 cells. This is followed by a first copy of mature feline IL-31 (meaning fel-IL-31; SEQ ID NO: 61). After this first copy of mature feline IL-31 (SEQ ID NO: 60), the Tetanus toxin p2 T-cell epitope (amino acids 1273-1284 of the tetanus toxin, SEQ ID NO: 1) is included, followed by a second copy of mature feline IL-31. After this second copy of mature feline IL-31, the Tetanus toxin p30 T-cell epitope (amino acids 947-968 of the tetanus toxin, SEQ ID NO: 2) is attached, followed by a third copy of mature feline IL-31. Thereafter, two Tetanus toxin T-cell epitopes (p30 and p2) are included. These two Tetanus toxin T-cell epitopes are followed by a His₆-tag for protein purification.

[0690] FIG. 75A-C depicts the results of the ELISA at different sampling time points using fel-IL-31 as ELISA plate coating antigen for cat sera of animals “Cat 3132,” “Cat 0487,” and “Cat 5674”, which were immunized using fel-IL-31 polyprotein. Time points are Day 2 serum (open circles), Day 7 post immunization (open diamonds), Day 14 post immunization (open triangles), Day 21 post immunization (“x”), Day 27 post immunization (star), Day 35 post immunization (closed circles); Day 42 post immunization (closed diamonds), Day 49 post-immunization (closed triangles), Day 56 post-immunization (bold “x”), and Day 63 post-immunization (closed square). These results are further explained in Example 14f.

[0691] FIG. 76A-C depicts the results of the ELISA at different sampling time points using fel-IL-31 as ELISA plate coating antigen for cat sera of animals “Cat 3132,” “Cat 0487,” and “Cat 5674”, which were immunized using fel-IL-31 polyprotein. Time points are Days 63, 70, 77, 84, 91, 98, 105, 112, 119, and 126 post-immunization serum (see legend for symbols). These results are further explained in Example 14f.

[0692] FIG. 77 depicts an embodiment of the polyprotein according to the invention. The N-terminus of the polyprotein begins with a start methionine and the His₆ tag to allow expression in E. coli cells. This is followed by a first copy of mature bovine TNF-alpha (meaning SEQ ID NO: 64). After this first copy of mature bovine TNF-alpha, the Tetanus toxin p30 T-cell epitope (amino acids 947-968 of the tetanus toxin, SEQ ID NO: 2) is included, followed by a second copy of mature bovine TNF-alpha. After this second copy of mature bovine TNF-alpha, the Tetanus toxin p2 T-cell epitope (amino acids 1273-1284 of the tetanus toxin, SEQ ID NO: 1) is attached, followed by a third copy of mature bovine TNF-alpha. Thereafter, two Tetanus toxin T-cell epitopes (p30 and p2) are included.

[0693] FIG. 78 depicts a plasmid map of the vector pET30a-bov-TNF-alpha-poly, which encodes the bovine TNF-alpha polyprotein.

[0694] FIG. 79 depicts the results of the ELISA using bovine-TNF-alpha as ELISA plate coating antigen for rabbit preimmune serum (“x”) and antiserum (circles) raised against bovine-TNF-alpha-polyprotein.

The application's sequence listing, which the Patent Office published only in electronic form, follows.

SEQUENCE LISTING (329 sequences)

SEQ ID NO: 1 - protein, 15 aa, Clostridium tetani
  MISC_FEATURE (1)..(15): SEQ ID NO: 1 is the amino acid sequence of the Tetanus Toxin T-cell epitope p2
QYIKANSKFIGITEL

SEQ ID NO: 2 - protein, 21 aa, Clostridium tetani
  MISC_FEATURE (1)..(21): SEQ ID NO: 2 is the amino acid sequence of the Tetanus Toxin T-cell epitope p30
FNNFTVSFWLRVPKVSASHLE

SEQ ID NO: 3 - protein, 136 aa, Canis lupus familiaris
  MISC_FEATURE (1)..(136): SEQ ID NO: 3 is the amino acid sequence of canine IL-31
SHMAPTHQLPPSDVRKIILELQPLSRGLLEDYQKKETGVPESNRTLLLCLTSDSQPPRLNSSAILPYFRAIRPLSDKNIIDKIIEQLDKLKFQHEPETEISVPADTFECKSFILTILQQFSACLESVFKSLNSGPQ

SEQ ID NO: 4 - protein, 507 aa, Artificial Sequence
  SEQ ID NO: 4 is one version of the amino acid sequence of the cIL-31 polyprotein used for the vaccine composition of Example 13
APTHQLPPSDVRKIILELQPLSRGLLEDYQKKETGVPESNRTLLLCLTSDSQPPRLNSSAILPYFRAIRPLSDKNIIDKIIEQLDKLKFQHEPETEISVPADTFECKSFILTILQQFSACLESVFKSLNSGPQGSGGQYIKANSKFIGITELAGSGSHMAPTHQLPPSDVRKIILELQPLSRGLLEDYQKKETGVPESNRTLLLCLTSDSQPPRLNSSAILPYFRAIRPLSDKNIIDKIIEQLDKLKFQHEPETEISVPADTFECKSFILTILQQFSACLESVFKSLNSGPQAGSGFNNFTVSFWLRVPKVSASHLESGGSSHMAPTHQLPPSDVRKIILELQPLSRGLLEDYQKKETGVPESNRTLLLCLTSDSQPPRLNSSAILPYFRAIRPLSDKNIIDKIIEQLDKLKFQHEPETEISVPADTFECKSFILTILQQFSACLESVFKSLNSGPQAGSGFNNFTVSFWLRVPKVSASHLEGSGGQYIKANSKFIGITELHHHHHH

SEQ ID NO: 5 - DNA, 20 bp, Artificial Sequence
  SEQ ID NO: 5 is the nucleic acid sequence of the immunostimulatory oligonucleotide 1668-PTO
tccatgacgttcctgatgct

SEQ ID NO: 6 - DNA, 24 bp, Artificial Sequence
  SEQ ID NO: 6 is the nucleic acid sequence of the immunostimulatory oligonucleotide 2006-PTO
tcgtcgttttgtcgttttgtcgtt

SEQ ID NO: 7 - DNA, 7637 bp, Artificial Sequence
  SEQ ID NO: 7 is the nucleic acid sequence of the plasmid pcDNA3.4-cIL31-poly encoding the cIL-31 plyprotein construct of Example 1
gttaggcgttttgcgctgcttcgcgatgtacgggccagatatacgcgttgacattgattattgactagttattaatagtaatcaattacggggtcattagttcatagcccatatatggagttccgcgttacataacttacggtaaatggcccgcctggctgaccgcccaacgacccccgcccattgacgtcaataatgacgtatgttcccatagtaacgccaatagggactttccattgacgtcaatgggtggagtatttacggtaaactgcccacttggcagtacatcaagtgtatcatatgccaagtacgccccctattgacgtcaatgacggtaaatggcccgcctggcattatgcccagtacatgaccttatgggactttcctacttggcagtacatctacgtattagtcatcgctattaccatggtgatgcggttttggcagtacatcaatgggcgtggatagcggtttgactcacggggatttccaagtctccaccccattgacgtcaatgggagtttgttttggcaccaaaatcaacgggactttccaaaatgtcgtaacaactccgccccattgacgcaaatgggcggtaggcgtgtacggtgggaggtctatataagcagagctcgtttagtgaaccgtcagatcgcctggagacgccatccacgctgttttgacctccatagaagacaccgggaccgatccagcctccggactctagaggatcgaacccttgaattcccgccgccaccatgctgtctcacacaggcccttctagattcgccctgttcctgctgtgcagcatggaaaccctgctgagcagccacatggcccctacacatcagctgcctccatccgacgtgcggaagatcatcctggaactgcagcctctgagcagaggcctgctggaagattaccagaaaaaagaaaccggcgtgcccgagagcaacaggaccctgctgctgtgtctgaccagcgatagccagcctcctagactgaacagcagcgccatcctgccttacttcagagccatcagacccctgagcgacaagaacatcatcgacaagatcatcgagcagctggacaagctgaagttccagcacgagcccgagacagagattagcgtgcccgccgataccttcgagtgcaagagcttcatcctgaccatcctgcagcagttcagcgcctgcctggaaagcgtgttcaagagcctgaacagcggccctcaaggatctggcggccagtacatcaaggccaacagcaagttcatcggcatcaccgagctggccggctctggatctcatatggctccaactcaccagctgccacctagtgatgtgcgcaagattattctcgagctgcagcccctgtctaggggcctgcttgaggactatcaaaagaaagagacaggcgtccccgagtccaatcgcacactgctgctttgcctgacatccgacagccagccacctcggctgaatagctctgccattctgccctactttcgggccattaggcccctgtccgataagaatatcattgataagattattgaacagctcgataagctcaaatttcagcacgaaccggaaaccgagatctccgtgcctgccgacacatttgaatgcaagtcttttatcctcacgattctccagcagttttccgcctgtctggaatccgtgtttaagtccctgaatagcggaccccaggccggcagcggcttcaacaatttcaccgtgtccttttggctgcgggtgcccaaagtgtctgccagccatcttgagtctggcggcagctcacacatggcacccactcatcaactcccaccttcagatgtgcggaaaatcatacttgagctgcaaccactgagccggggactgttggaggattaccaaaagaaagaaactggggtcccagaaagcaatcggactctgctcctgtgcctcacctccgactctcagcctccaaggctcaactcctccgctatcctgccatatttccgggccatccggcctctgtctgacaaaaacattattgacaaaattatcgaacaacttgacaaactcaagtttcaacatgagcccgaaaccgaaatttctgtgcccgctgacacttttgagtgtaaatccttcattctcacgatcctgcaacaattctctgcctgcctcgagtctgtgttcaagtctctgaactcaggccctcaggccggctccgggtttaacaactttacagtgtctttctggctcagagtccccaaggtgtccgcctctcaccttgaaggttccggcggacagtatattaaggctaactctaagtttatcgggattacagagctgcaccaccaccatcaccactgataagcttaagggttcgatccctaccggttagtaatgagtttgatatctcgacaatcaacctctggattacaaaatttgtgaaagattgactggtattcttaactatgttgctccttttacgctatgtggatacgctgctttaatgcctttgtatcatgctattgcttcccgtatggctttcattttctcctccttgtataaatcctggttgctgtctctttatgaggagttgtggcccgttgtcaggcaacgtggcgtggtgtgcactgtgtttgctgacgcaacccccactggttggggcattgccaccacctgtcagctcctttccgggactttcgctttccccctccctattgccacggcggaactcatcgccgcctgccttgcccgctgctggacaggggctcggctgttgggcactgacaattccgtggtgttgtcggggaagctgacgtcctttccatggctgctcgcctgtgttgccacctggattctgcgcgggacgtccttctgctacgtcccttcggccctcaatccagcggaccttccttcccgcggcctgctgccggctctgcggcctcttccgcgtcttcgccttcgccctcagacgagtcggatctccctttgggccgcctccccgcctggaaacgggggaggctaactgaaacacggaaggagacaataccggaaggaacccgcgctatgacggcaataaaaagacagaataaaacgcacgggtgttgggtcgtttgttcataaacgcggggttcggtcccagggctggcactctgtcgataccccaccgagaccccattggggccaatacgcccgcgtttcttccttttccccaccccaccccccaagttcgggtgaaggcccagggctcgcagccaacgtcggggcggcaggccctgccatagcagatctgcgcagctggggctctagggggtatccccacgcgccctgtagcggcgcattaagcgcggcgggtgtggtggttacgcgcagcgtgaccgctacacttgccagcgccctagcgcccgctcctttcgctttcttcccttcctttctcgccacgttcgccggctttccccgtcaagctctaaatcggggcatccctttagggttccgatttagtgctttacggcacctcgaccccaaaaaacttgattagggtgatggttcacgtagtgggccatcgccctgatagacggtttttcgccctttgacgttggagtccacgttctttaatagtggactcttgttccaaactggaacaacactcaaccctatctcggtctattcttttgatttataagggattttggggatttcggcctattggttaaaaaatgagctgatttaacaaaaatttaacgcgaattaattctgtggaatgtgtgtcagttagggtgtggaaagtccccaggctccccagcaggcagaagtatgcaaagcatgcatctcaattagtcagcaaccaggtgtggaaagtccccaggctccccagcaggcagaagtatgcaaagcatgcatctcaattagtcagcaaccatagtcccgcccctaactccgcccatcccgcccctaactccgcccagttccgcccattctccgccccatggctgactaattttttttatttatgcagaggccgaggccgcctctgcctctgagctattccagaagtagtgaggaggcttttttggaggcctaggcttttgcaaaaagctcccgggagcttgtatatccattttcggatctgatcaagagacaggatgaggatcgtttcgcatgattgaacaagatggattgcacgcaggttctccggccgcttgggtggagaggctattcggctatgactgggcacaacagacaatcggctgctctgatgccgccgtgttccggctgtcagcgcaggggcgcccggttctttttgtcaagaccgacctgtccggtgccctgaatgaactgcaggacgaggcagcgcggctatcgtggctggccacgacgggcgttccttgcgcagctgtgctcgacgttgtcactgaagcgggaagggactggctgctattgggcgaagtgccggggcaggatctcctgtcatctcaccttgctcctgccgagaaagtatccatcatggctgatgcaatgcggcggctgcatacgcttgatccggctacctgcccattcgaccaccaagcgaaacatcgcatcgagcgagcacgtactcggatggaagccggtcttgtcgatcaggatgatctggacgaagagcatcaggggctcgcgccagccgaactgttcgccaggctcaaggcgcgcatgcccgacggcgaggatctcgtcgtgacccatggcgatgcctgcttgccgaatatcatggtggaaaatggccgcttttctggattcatcgactgtggccggctgggtgtggcggaccgctatcaggacatagcgttggctacccgtgatattgctgaagagcttggcggcgaatgggctgaccgcttcctcgtgctttacggtatcgccgctcccgattcgcagcgcatcgccttctatcgccttcttgacgagttcttctgagcgggactctggggttcgcgaaatgaccgaccaagcgacgcccaacctgccatcacgagatttcgattccaccgccgccttctatgaaaggttgggcttcggaatcgttttccgggacgccggctggatgatcctccagcgcggggatctcatgctggagttcttcgcccaccccaacttgtttattgcagcttataatggttacaaataaagcaatagcatcacaaatttcacaaataaagcatttttttcactgcattctagttgtggtttgtccaaactcatcaatgtatcttatcatgtctgtataccgtcgacctctagctagagcttggcgtaatcatggtcatagctgtttcctgtgtgaaattgttatccgctcacaattccacacaacatacgagccggaagcataaagtgtaaagcctggggtgcctaatgagtgagctaactcacattaattgcgttgcgctcactgcccgctttccagtcgggaaacctgtcgtgccagctgcattaatgaatcggccaacgcgcggggagaggcggtttgcgtattgggcgctcttccgcttcctcgctcactgactcgctgcgctcggtcgttcggctgcggcgagcggtatcagctcactcaaaggcggtaatacggttatccacagaatcaggggataacgcaggaaagaacatgtgagcaaaaggccagcaaaaggccaggaaccgtaaaaaggccgcgttgctggcgtttttccataggctccgcccccctgacgagcatcacaaaaatcgacgctcaagtcagaggtggcgaaacccgacaggactataaagataccaggcgtttccccctggaagctccctcgtgcgctctcctgttccgaccctgccgcttaccggatacctgtccgcctttctcccttcgggaagcgtggcgctttctcaatgctcacgctgtaggtatctcagttcggtgtaggtcgttcgctccaagctgggctgtgtgcacgaaccccccgttcagcccgaccgctgcgccttatccggtaactatcgtcttgagtccaacccggtaagacacgacttatcgccactggcagcagccactggtaacaggattagcagagcgaggtatgtaggcggtgctacagagttcttgaagtggtggcctaactacggctacactagaaggacagtatttggtatctgcgctctgctgaagccagttaccttcggaaaaagagttggtagctcttgatccggcaaacaaaccaccgctggtagcggtggtttttttgtttgcaagcagcagattacgcgcagaaaaaaaggatctcaagaagatcctttgatcttttctacggggtctgacgctcagtggaacgaaaactcacgttaagggattttggtcatgagattatcaaaaaggatcttcacctagatccttttaaattaaaaatgaagttttaaatcaatctaaagtatatatgagtaaacttggtctgacagttaccaatgcttaatcagtgaggcacctatctcagcgatctgtctatttcgttcatccatagttgcctgactccccgtcgtgtagataactacgatacgggagggcttaccatctggccccagtgctgcaatgataccgcgagacccacgctcaccggctccagatttatcagcaataaaccagccagccggaagggccgagcgcagaagtggtcctgcaactttatccgcctccatccagtctattaattgttgccgggaagctagagtaagtagttcgccagttaatagtttgcgcaacgttgttgccattgctacaggcatcgtggtgtcacgctcgtcgtttggtatggcttcattcagctccggttcccaacgatcaaggcgagttacatgatcccccatgttgtgcaaaaaagcggttagctccttcggtcctccgatcgttgtcagaagtaagttggccgcagtgttatcactcatggttatggcagcactgcataattctcttactgtcatgccatccgtaagatgcttttctgtgactggtgagtactcaaccaagtcattctgagaatagtgtatgcggcgaccgagttgctcttgcccggcgtcaatacgggataataccgcgccacatagcagaactttaaaagtgctcatcattggaaaacgttcttcggggcgaaaactctcaaggatcttaccgctgttgagatccagttcgatgtaacccactcgtgcacccaactgatcttcagcatcttttactttcaccagcgtttctgggtgagcaaaaacaggaaggcaaaatgccgcaaaaaagggaataagggcgacacggaaatgttgaatactcatactcttcctttttcaatattattgaagcatttatcagggttattgtctcatgagcggatacatatttgaatgtatttagaaaaataaacaaataggggttccgcgcacatttccccgaaaagtgccacctgacgtcgacggatcgggagatctcccgatcccctatggtcgactctcagtacaatctgctctgatgccgcatagttaagccagtatctgctccctgcttgtgtgttggaggtcgctgagtagtgcgcgagcaaaatttaagctacaacaaggcaaggcttgaccgacaattgcatgaagaatctgcttagg

SEQ ID NO: 8 - protein, 5 aa, Artificial Sequence
  Sequence related to the labeled neutralizing antibody suitable for the assay of the invention (cf. WO2013/011407 A1)
YYDIN

SEQ ID NO: 9 - protein, 5 aa, Artificial Sequence
  Sequence related to the labeled neutralizing antibody suitable for the assay of the invention (cf. WO2013/011407 A1)
SYDMS

SEQ ID NO: 10 - protein, 5 aa, Artificial Sequence
  Sequence related to the labeled neutralizing antibody suitable for the assay of the invention (cf. WO2013/011407 A1)
NYGMS

SEQ ID NO: 11 - protein, 17 aa, Artificial Sequence
  Sequence related to the labeled neutralizing antibody suitable for the assay of the invention (cf. WO2013/011407 A1)
WIFPGDGGTKYNETFKG

SEQ ID NO: 12 - protein, 17 aa, Artificial Sequence
  Sequence related to the labeled neutralizing antibody suitable for the assay of the invention (cf. WO2013/011407 A1)
TITSGGGYTYSADSVKG

SEQ ID NO: 13 - protein, 17 aa, Artificial Sequence
  Sequence related to the labeled neutralizing antibody suitable for the assay of the invention (cf. WO2013/011407 A1)
TISYGGSYTYYPDNIKG

SEQ ID NO: 14 - protein, 14 aa, Artificial Sequence
  Sequence related to the labeled neutralizing antibody suitable for the assay of the invention (cf. WO2013/011407 A1)
ARGGTSVIRDAMDY

SEQ ID NO: 15 - protein, 11 aa, Artificial Sequence
  Sequence related to the labeled neutralizing antibody suitable for the assay of the invention (cf. WO2013/011407 A1)
ARQNWVVGLAY

SEQ ID NO: 16 - protein, 11 aa, Artificial Sequence
  Sequence related to the labeled neutralizing antibody suitable for the assay of the invention (cf. WO2013/011407 A1)
VRGYGYDTMDY

SEQ ID NO: 17 - protein, 15 aa, Artificial Sequence
  Sequence related to the labeled neutralizing antibody suitable for the assay of the invention (cf. WO2013/011407 A1)
RASESVDNYGISFMH

SEQ ID NO: 18 - protein, 17 aa, Artificial Sequence
  Sequence related to the labeled neutralizing antibody suitable for the assay of the invention (cf. WO2013/011407 A1)
KSSQSLLNSGNQKNYLA

SEQ ID NO: 19 - protein, 15 aa, Artificial Sequence
  Sequence related to the labeled neutralizing antibody suitable for the assay of the invention (cf. WO2013/011407 A1)
KASQSVSFAGTGLMH

SEQ ID NO: 20 - protein, 7 aa, Artificial Sequence
  Sequence related to the labeled neutralizing antibody suitable for the assay of the invention (cf. WO2013/011407 A1)
RASNLES

SEQ ID NO: 21 - protein, 7 aa, Artificial Sequence
  Sequence related to the labeled neutralizing antibody suitable for the assay of the invention (cf. WO2013/011407 A1)
GASTRES

SEQ ID NO: 22 - protein, 7 aa, Artificial Sequence
  Sequence related to the labeled neutralizing antibody suitable for the assay of the invention (cf. WO2013/011407 A1)
RASNLEA

SEQ ID NO: 23 - protein, 9 aa, Artificial Sequence
  Sequence related to the labeled neutralizing antibody suitable for the assay of the invention (cf. WO2013/011407 A1)
QQSNKDPLT

SEQ ID NO: 24 - protein, 9 aa, Artificial Sequence
  Sequence related to the labeled neutralizing antibody suitable for the assay of the invention (cf. WO2013/011407 A1)
QNDYSYPYT

SEQ ID NO: 25 - protein, 9 aa, Artificial Sequence
  Sequence related to the labeled neutralizing antibody suitable for the assay of the invention (cf. WO2013/011407 A1)
QQSREYPWT

SEQ ID NO: 26 - protein, 109 aa, Artificial Sequence
  Sequence related to the labeled neutralizing antibody suitable for the assay of the invention (cf. WO2013/011407 A1)
DIVLTQSPASLAVSLGQRATISCRASESVDNYGISFMHWYQQKPGQPPKWYRASNLESGIPARFSGSGSRTDFTLTINPVETDDVATYYCQQSNKDPLTFGAGTKLELK

SEQ ID NO: 27 - protein, 109 aa, Artificial Sequence
  Sequence related to the labeled neutralizing antibody suitable for the assay of the invention (cf. WO2013/011407 A1)
DIVMTQTPLSLSVSPGEPASISCRASESVDNYGISFMHWYQQKPGQPPKWYRASNLESGVPDRFSGSGSGTDFTLRISRVEADDAGVYYCQQSNKDPLTFGAGTKLEIK

SEQ ID NO: 28 - protein, 111 aa, Artificial Sequence
  Sequence related to the labeled neutralizing antibody suitable for the assay of the invention (cf. WO2013/011407 A1)
DIVMTQTPLSLSVSPGEPASISCRASESVDNYGISFMHWFQQKPGQSPQLLIYRASNLESGVPDRFSGSGSGTDFTLRISRVEADDAGVYYCQQSNKDPLTFGAGTKLEIK

SEQ ID NO: 29 - protein, 113 aa, Artificial Sequence
  Sequence related to the labeled neutralizing antibody suitable for the assay of the invention (cf. WO2013/011407 A1)
DIVMSQSPSSLSVSAGDKVTMSCKSSQSLLNSGNQKNYLAWYQQKPWQPPKLLIYGASTRESGVPDRFTGSGSGTDFTLTISSVQAEDLAVYYCQNDYSYPYTFGGGTKLEIK

SEQ ID NO: 30 - protein, 113 aa, Artificial Sequence
  Sequence related to the labeled neutralizing antibody suitable for the assay of the invention (cf. WO2013/011407 A1)
EIVMTQSPASLSLSQEEKVTITCKSSQSLLNSGNQKNYLAWYQQKPGQAPKLLIYGASTRESGVPSRFSGSGSGTDFSFTISSLEPEDVAVYYCQNDYSYPYTFGQGTKLEIK

SEQ ID NO: 31 - protein, 111 aa, Artificial Sequence
  Sequence related to the labeled neutralizing antibody suitable for the assay of the invention (cf. WO2013/011407 A1)
DILLTQSPASLAVSLGQRAIISCKASQSVSFAGTGLMHWYQQKPGQQPKLLIYRASNLEAGVPTRFSGSGSRTDFTLNIHPVEEEDAATYFCQQSREYPWTFGGGTKLEIK

SEQ ID NO: 32 - protein, 109 aa, Artificial Sequence
  Sequence related to the labeled neutralizing antibody suitable for the assay of the invention (cf. WO2013/011407 A1)
EIVMTQSPASLSLSQEEKVTITCKASQSVSFAGTGLMHWYQQKPGQAPKWYRASNLEAGVPSRFSGSGSGTDFSFTISSLEPEDVAVYYCQQSREYPWTFGQGTKLEIK

SEQ ID NO: 33 - protein, 121 aa, Artificial Sequence
  Sequence related to the labeled neutralizing antibody suitable for the assay of the invention (cf. WO2013/011407 A1)
QVQLQQSGAELVKPGASVKLSCKASGYTFKYYDINWVRQRPEQGLEWIGWIFPGDGGTKYNETFKGKATLTTDKSSSTAYMQLSRLTSEDSAVYFCARGGTSVIRDAMDYWGQGTSVTVSS

SEQ ID NO: 34 - protein, 121 aa, Artificial Sequence
  Sequence related to the labeled neutralizing antibody suitable for the assay of the invention (cf. WO2013/011407 A1)
EVQLVQSGAEVKKPGASVKVSCKTSGYTFKYYDINWVRQAPGAGLDWMGWIFPGDGGTKYNETFKGRVTLTADTSTSTAYMELSSLRAGDIAVYYCARGGTSVIRDAMDYWGQGTLVTVSS

SEQ ID NO: 35 - protein, 118 aa, Artificial Sequence
  Sequence related to the labeled neutralizing antibody suitable for the assay of the invention (cf. WO2013/011407 A1)
EVKLVESGGGLVKPGGSLKLSCAASGFAFSSYDMSWVRQIPEKRLEWVATITSGGGYTYSADSVKGRFTISRDNARNTLYLQMSSLRSEDTAVYYCARQNWVVGLAYWGQGTLVTVSA

SEQ ID NO: 36 - protein, 118 aa, Artificial Sequence
  Sequence related to the labeled neutralizing antibody suitable for the assay of the invention (cf. WO2013/011407 A1)
EVQLVESGGDLVKPGGSLRLSCVASGFTFSSYDMSWVRQAPGKGLQWVATITSGGGYTYSADSVKGRFTISRDNARNTLYLQMNSLRSEDTAVYYCARQNWVVGLAYWGQGTLVTVSS

SEQ ID NO: 37 - protein, 118 aa, Artificial Sequence
  Sequence related to the labeled neutralizing antibody suitable for the assay of the invention (cf. WO2013/011407 A1)
EVQLVESGGDLVKPGGSLKLSCAASGFSFSNYGMSWVRQTPDKRLEWVATISYGGSYTYYPDNIKGRFTISRDNAKNTLYLQMSSLKSEDTAMYYCVRGYGYDTMDYWGQGTSVTVSS

SEQ ID NO: 38 - protein, 119 aa, Artificial Sequence
  Sequence related to the labeled neutralizing antibody suitable for the assay of the invention (cf. WO2013/011407 A1)
EVQLVESGGDLVKPGGSLRLSCVASGFTFSNYGMSWVRQAPGKGLQWVATISYGGSYTYYPDNIKGRFTISRDNAKNTLYLQMNSLRAEDTAMYYCVRGYGYDTMDYVVGQGTLVTVSS

SEQ ID NO: 39 - protein, 12 aa, Clostridium tetani
  MISC_FEATURE (1)..(12): SEQ ID NO: 39 is the amino acid sequence of the Tetanus Toxin T-cell epitope p4
GQIGNDPNRDIL

SEQ ID NO: 40 - protein, 510 aa, Artificial Sequence
  SEQ ID NO: 40 is another version of the amino acid sequence of the cIL-31 polyprotein used for the vaccine of Example 13
SHMAPTHQLPPSDVRKIILELQPLSRGLLEDYQKKETGVPESNRTLLLCLTSDSQPPRLNSSAILPYFRAIRPLSDKNIIDKIIEQLDKLKFQHEPETEISVPADTFECKSFILTILQQFSACLESVFKSLNSGPQGSGGQYIKANSKFIGITELAGSGSHMAPTHQLPPSDVRKIILELQPLSRGLLEDYQKKETGVPESNRTLLLCLTSDSQPPRLNSSAILPYFRAIRPLSDKNIIDKIIEQLDKLKFQHEPETEISVPADTFECKSFILTILQQFSACLESVFKSLNSGPQAGSGFNNFTVSFWLRVPKVSASHLESGGSSHMAPTHQLPPSDVRKIILELQPLSRGLLEDYQKKETGVPESNRTLLLCLTSDSQPPRLNSSAILPYFRAIRPLSDKNIIDKIIEQLDKLKFQHEPETEISVPADTFECKSFILTILQQFSACLESVFKSLNSGPQAGSGFNNFTVSFWLRVPKVSASHLEGSGGQYIKANSKFIGITELHHHHHH

SEQ ID NO: 41 - protein, 115 aa, Canis lupus familiaris
  MISC_FEATURE (1)..(115): SEQ ID NO: 41 is the amino acid sequence of canine IL-5 protein.
FAVENPMNRLVAETLTLLSTHRTWLIGDGNLMIPTPENKNHQLCIKEVFQGIDTLKNQTAHGEAVDKLFQNLSLIKEHIERQKKRCAGERWRVTKFLDYLQVFLGVINTEWTPES

SEQ ID NO: 42 - protein, 445 aa, Artificial sequence
  SEQ ID NO: 42 is the amino acid sequence of the cIL-5 polyprotein used for the vaccine construct of Example 13b.
VENPMNRLVAETLTLLSTHRTWLIGDGNLMIPTPENKNHQLCIKEVFQGIDTLKNQTAHGEAVDKLFQNLSLIKEHIERQKKRCAGERWRVTKFLDYLQVFLGVINTEWTPESGSGGQYIKANSKFIGITELAGSGFAVENPMNRLVAETLTLLSTHRTWLIGDGNLMIPTPENKNHQLCIKEVFQGIDTLKNQTAHGEAVDKLFQNLSLIKEHIERQKKRCAGERWRVTKFLDYLQVFLGVINTEWTPESAGSGFNNFTVSFWLRVPKVSASHLESGGSFAVENPMNRLVAETLTLLSTHRTWLIGDGNLMIPTPENKNHQLCIKEVFQGIDTLKNQTAHGEAVDKLFQNLSLIKEHIERQKKRCAGERWRVTKFLDYLQVFLGVINTEWTPESAGSGFNNFTVSFWLRVPKVSASHLEGSGGQYIKANSKFIGITELHHHHHH

SEQ ID NO: 43 - protein, 447 aa, Artificial sequence
  SEQ ID NO: 43 is an alternative amino acid sequence of the cIL-5 polyprotein that can be used for the vaccine construct of Example 13b.
FAVENPMNRLVAETLTLLSTHRTWLIGDGNLMIPTPENKNHQLCIKEVFQGIDTLKNQTAHGEAVDKLFQNLSLIKEHIERQKKRCAGERWRVTKFLDYLQVFLGVINTEWTPESGSGGQYIKANSKFIGITELAGSGFAVENPMNRLVAETLTLLSTHRTWLIGDGNLMIPTPENKNHQLCIKEVFQGIDTLKNQTAHGEAVDKLFQNLSLIKEHIERQKKRCAGERWRVTKFLDYLQVFLGVINTEWTPESAGSGFNNFTVSFWLRVPKVSASHLESGGSFAVENPMNRLVAETLTLLSTHRTWLIGDGNLMIPTPENKNHQLCIKEVFQGIDTLKNQTAHGEAVDKLFQNLSLIKEHIERQKKRCAGERWRVTKFLDYLQVFLGVINTEWTPESAGSGFNNFTVSFWLRVPKVSASHLEGSGGQYIKANSKFIGITELHHHHHH

SEQ ID NO: 44 - DNA, 1419 bp, Canis lupus familiaris
  MISC_FEATURE (1)..(1419): SEQ ID NO: 44 is the nucleic acid sequence of the plasmid pcDNA3.4-cIL-5-poly encoding the cIL-5 polyprotein construct of Example 1b.
gaattcccgccgccaccatgggatggagctgcatcatcctgttcctggtcgctacagccaccggcgtgcacagcgtggaaaaccccatgaatagactggtggccgaaaccttgacactcctgagcacccacagaacatggctgatcggcgacggaaacctgatgattcctacccctgagaacaagaaccaccagctgtgtatcaaggaggtgttccagggcatagacacactgaagaatcagaccgctcacggcgaggccgtggataagctgttccaaaatttaagcctgatcaaggagcacatcgagagacagaagaaaagatgcgccggcgagagatggagagtgaccaagttcctggactacctgcaagtgttcctgggagttatcaataccgagtggacccctgaatccggcagcggcggccagtacatcaaggccaatagcaagttcatcggcattacagaactggccggcagcggcttcgccgtcgagaaccctatgaaccgcctggtggctgaaaccctgaccctgctctctacccacagaacctggctgatcggcgacggcaacctgatgatcccaacaccagagaacaagaaccaccagctgtgcattaaagaggtgttccagggtatcgataccctgaaaaaccagacagcccatggagaagccgtggacaagctgttccaaaacctgtccctgatcaaagaacacatcgagcggcagaaaaaaagatgtgccggagagaggtggcgggtcaccaagttcctggattacctgcaggtgtttctgggcgtgatcaacacggagtggacacctgagagcgctggcagcggctttaacaacttcaccgtgtccttttggctgagagttcctaaggtgtccgccagccacctggaaagcggcggatcttttgccgtggaaaatcccatgaaccggctggtggccgagaccctgacactgctgtctacacaccggacctggctgatcggcgatggcaatctgatgatccccacacctgagaacaagaaccaccagctgtgcatcaaggaagtgttccagggcatcgacacccttaagaaccagaccgcccacggcgaggctgtggacaagctgttccagaacctgtctctgatcaaggaacacatcgagcggcagaagaagcggtgcgccggcgaaagatggagagtgacaaagttcctggactatctgcaggtgttcctgggcgttatcaacaccgagtggacccctgagagcgccggcagcggtttcaacaacttcaccgtgagcttctggcttagagtgcccaaggtgtctgcatctcacctggaaggcagcggaggccagtacatcaaagccaacagcaagtttatcggcatcaccgagctgcaccatcatcaccaccactgataagctt

SEQ ID NO: 45 - DNA, 441 bp, Canis lupus familiaris
  MISC_FEATURE (1)..(441): SEQ ID NO: 45 is the nucleic acid sequence of the plasmid pcDNA3.4-cIL-5 encoding the cIL-5 protein construct of Example 3b.
gaattcccgccgccaccatgggctggtcctgcatcatcctgttcctggtcgccaccgccacaggcgtgcacagcgtggaaaatcctatgaacagactggtggctgaaaccctcaccctgctgagcacacacagaacctggctgatcggcgacggcaacctgatgatccccacccctgagaacaagaatcaccagctgtgtatcaaagaggtgttccaaggcatcgacaccctgaagaaccagacagcccacggcgaggccgtggacaagctgtttcagaacctgtctctgattaaggaacacatcgagagacagaaaaagcggtgcgccggagaaagatggcgggtgacaaagttcctggattacctgcaggtgttcctgggagtgatcaacaccgagtggaccccagagagccaccaccaccaccatcactgataagctt

SEQ ID NO: 46 - protein, 113 aa, Canis lupus familiaris
  MISC_FEATURE (1)..(113): SEQ ID NO: 46 is the amino acid sequence of canine IL-13.
SPSPVTPSPTLKELIEELVNITQNQASLCNGSMVWSVNLTAGMYCAALESLINVSDCSAIQRTQRMLKALCSQKPAAGQISSERSRDTKIEVIQLVKNLLTYVRGVYRHGNFR

SEQ ID NO: 47 - protein, 441 aa, Artificial sequence
  SEQ ID NO: 47 is the amino acid sequence of the cIL-13 polyprotein used for the vaccine construct of Example 13c.
SPSPVTPSPTLKELIEELVNITQNQASLCNGSMVWSVNLTAGMYCAALESLINVSDCSAIQRTQRMLKALCSQKPAAGQISSERSRDTKIEVIQLVKNLLTYVRGVYRHGNFRGSGGQYIKANSKFIGITELAGSGSPSPVTPSPTLKELIEELVNITQNQASLCNGSMVWSVNLTAGMYCAALESLINVSDCSAIQRTQRMLKALCSQKPAAGQISSERSRDTKIEVIQLVKNLLTYVRGVYRHGNFRAGSGFNNFTVSFWLRVPKVSASHLESGGSSPSPVTPSPTLKELIEELVNITQNQASLCNGSMVWSVNLTAGMYCAALESLINVSDCSAIQRTQRMLKALCSQKPAAGQISSERSRDTKIEVIQLVKNLLTYVRGVYRHGNFRAGSGFNNFTVSFWLRVPKVSASHLEGSGGQYIKANSKFIGITELHHHHHH

SEQ ID NO: 48 - DNA, 1407 bp, Artificial sequence
  SEQ ID NO: 48 is the nucleic acid sequence of the plasmid pcDNA3.4-cIL-13-poly encoding the cIL-13 polyprotein construct of Example 1c.
gaattcccgccgccaccatgggctggtcctgcatcatcctgttcctggtcgccacagccaccggcgtgcacagcagcccatctcctgtgacccctagccctaccctgaaggagctgatcgaggaactggtgaatatcacccagaaccaggcctctctgtgcaacggcagcatggtgtggtccgtgaacctgacagccggaatgtactgcgccgccctggaaagcctgatcaacgtgtcagattgcagcgccatccaaagaacacagagaatgctgaaagccctgtgctctcagaagcctgctgccgggcagatcagctctgagagaagccgggacacaaaaatcgaggtgatccagctggtgaagaacctgctgacctacgttagaggcgtgtacagacacggcaacttccggggctctggaggacagtacatcaaggcaaatagcaagttcatcggcatcacagagctggccggcagcggctctccttcacccgtgacccctagccctactctgaaggaactcattgaggaactggtgaatatcacacaaaatcaagccagcctgtgtaacggctccatggtctggagtgtgaacctgaccgctggcatgtactgcgccgctctggaatctctgatcaacgtgtccgactgcagcgccatccagcgaacccagagaatgctgaaggctctgtgttcccagaaacctgccgccggccagatcagcagcgagagaagcagagatacaaagatcgaggtgatccagctggtgaagaacctgctgacctacgtgcggggcgtgtacagacacggaaactttcgggccggcagcggatttaacaacttcaccgtgtccttctggctgagagtgcctaaggtgtctgcttctcacctggaaagcggaggctccagcccatctcctgtgacacccagccccaccctgaaagagctgatcgaagagctggtgaacatcacccagaatcaggccagcctgtgcaacggcagcatggtgtggagcgtgaacctgacagccggaatgtattgtgccgctctggagagcctgattaacgtgagcgactgcagcgctatccagagaacccagcggatgctgaaagccctgtgttctcagaagcccgccgccggccagatcagcagcgagcggagccgcgacaccaagatcgaggtgatccaactggtcaagaatctcctgacctacgtgaggggcgtttaccggcacggcaacttcagagccggcagcggcttcaacaacttcaccgtgtctttttggctcagagtgcccaaggtgtccgccagccacctggaaggcagcggcggccagtacatcaaggccaacagcaagttcatcggcatcaccgagctgcaccaccatcaccaccactgataagctt

SEQ ID NO: 49 - DNA, 375 bp, Artificial sequence
  SEQ ID NO: 49 is the nucleic acid sequence of the bacterial expression plasmid pET30a-cIL-13 encoding the cIL-13 protein construct of Example 3c.
catatgtcacccagtccagtaacaccctcaccaactctaaaggaactaatagaagaactggtgaacattacccaaaaccaagcgagcctgtgcaacggtagcatggtgtggagcgttaacctgaccgcgggcatgtactgcgcggcgctggagagcctgatcaacgtgagcgactgcagcgcgattcagcgtacccaacgtatgctgaaggcgctgtgcagccagaaaccggcggcgggtcaaatcagcagcgagcgtagccgtgataccaagatcgaagtgattcagctggttaaaaacctgctgacctatgttcgcggcgtttatcgccacggcaactttcgtcaccaccatcatcaccattaatgaaagctt

SEQ ID NO: 50 - protein, 154 aa, Canis lupus familiaris
  MISC_FEATURE (1)..(154): SEQ ID NO: 50 is the amino acid sequence of amino acids 110-263 of the full length dog IL-33 protein (Uniprot O97863) canine IL-33-WT.
SIQEYSASLSTYNDQSITFVFEDGSYEIYVEDLRKGQEKDKVLFRYYDSQSPSHETGDDVDGQTLLVNLSPTKDKDFLLHANNEEHSVELQKCENQLPDQAFFLLHRKSSECVSFECKNNPGVFIGVKDNHLALIKVGDQTKDSYIEKTIFKLS

SEQ ID NO: 51 - protein, 154 aa, Artificial sequence
  SEQ ID NO: 51 is the altered amino acid sequence of canine IL-33-CS , which is amino acids 110-263 of the full length dog IL-33 protein (Uniprot O97863), where the 3 cysteine residues are replaced by serine (IL-33-CS) to improve stability of the gene
SIQEYSASLSTYNDQSITFVFEDGSYEIYVEDLRKGQEKDKVLFRYYDSQSPSHETGDDVDGQTLLVNLSPTKDKDFLLHANNEEHSVELQKSENQLPDQAFFLLHRKSSESVSFESKNNPGVFIGVKDNHLALIKVGDQTKDSYIEKTIFKLS

SEQ ID NO: 52 - DNA, 498 bp, Artificial sequence
  SEQ ID NO: 52 is the nucleic acid sequence of the plasmid pET30a(+)-canIL33-WT encoding the cIL-33_WT protein construct of Example 3d.
catatgcaccaccatcatcatcacagcatccaagaatacagcgcgagcctgagcacctacaacgaccagagcatcaccttcgtgtttgaagatggtagctacgagatctatgtggaagacctgcgtaaaggccaggagaaggataaagttctgttccgttactatgacagccaaagcccgagccacgaaaccggtgacgatgtggacggccagaccctgctggttaacctgagcccgaccaaggacaaagattttctgctgcacgcgaacaacgaggaacacagcgtggagctgcaaaagtgcgaaaaccagctgccggatcaagcgttctttctgctgcaccgtaagagcagcgagtgcgttagcttcgaatgcaaaaacaacccgggtgtgtttattggcgttaaggacaaccacctggcgctgatcaaagtgggcgaccaaaccaaggacagctacatcgagaagaccattttcaaactgagctaatgaaagctt

SEQ ID NO: 53 - DNA, 498 bp, Artificial sequence
  SEQ ID NO: 53 is the nucleic acid sequence of the plasmid pET30a(+)-canIL33-CS encoding the cIL-33_CS protein construct construct of Example 3e.
catatgcaccaccaccaccaccactcaatacaagaatactcagctagtctatcaacctataacgaccagagcattacctttgtttttgaagatggtagctacgagatctatgtggaagacctgcgtaaaggccaggagaaggataaagttctgttccgttactatgacagccaaagcccgagccacgaaaccggtgacgatgtggatggccagaccctgctggttaacctgagcccgaccaaggacaaagattttctgctgcacgcgaacaacgaggaacacagcgtggagctgcaaaagagcgaaaaccagctgccggatcaagcgttctttctgctgcaccgtaagagcagcgagagcgttagcttcgaaagcaaaaacaacccgggtgtgtttattggcgttaaggacaaccacctggcgctgatcaaggttggcgaccagaccaaagatagctacatcgagaagaccattttcaaactgagctaatgaaagctt

SEQ ID NO: 54 - protein, 564 aa, Artificial sequence
  SEQ ID NO: 54 is the amino acid sequence of the cIL-33-CS polyprotein used for the vaccine construct of Example 13d.
SIQEYSASLSTYNDQSITFVFEDGSYEIYVEDLRKGQEKDKVLFRYYDSQSPSHETGDDVDGQTLLVNLSPTKDKDFLLHANNEEHSVELQKSENQLPDQAFFLLHRKSSESVSFESKNNPGVFIGVKDNHLALIKVGDQTKDSYIEKTIFKLSGSGGQYIKANSKFIGITELAGSGSIQEYSASLSTYNDQSITFVFEDGSYEIYVEDLRKGQEKDKVLFRYYDSQSPSHETGDDVDGQTLLVNLSPTKDKDFLLHANNEEHSVELQKSENQLPDQAFFLLHRKSSESVSFESKNNPGVFIGVKDNHLALIKVGDQTKDSYIEKTIFKLSAGSGFNNFTVSFWLRVPKVSASHLESGGSSIQEYSASLSTYNDQSITFVFEDGSYEIYVEDLRKGQEKDKVLFRYYDSQSPSHETGDDVDGQTLLVNLSPTKDKDFLLHANNEEHSVELQKSENQLPDQAFFLLHRKSSESVSFESKNNPGVFIGVKDNHLALIKVGDQTKDSYIEKTIFKLSAGSGFNNFTVSFWLRVPKVSASHLEGSGGQYIKANSKFIGITELHHHHHH

SEQ ID NO: 55 - DNA, 1710 bp, Artificial sequence
  SEQ ID NO: 55 is the nucleic acid sequence of the plasmid pET30a-cIL33-(CS-)poly encoding the cIL-33-CS polyprotein construct of Example 1d.
catatgcaccaccatcatcaccactccatccaagaatactccgcttccctgagcacctataacgaccaatccattacctttgtgtttgaagatggcagttatgaaatttacgtcgaagatctgcgtaagggtcaggaaaaagacaaagtgctgtttcgctattacgatagtcaatccccgtcacatgaaaccggcgatgacgttgatggtcagacgctgctggtcaacctgagcccgaccaaagataaagacttcctgctgcatgcgaacaatgaagaacactcggtggaactgcagaaaagcgaaaatcagctgccggaccaagcctttttcctgctgcatcgtaaaagctctgaatcggttagctttgaaagcaaaaacaatccgggcgttttcattggtgtcaaagataaccacctggcactgatcaaagtcggcgatcagacgaaagactcgtacatcgaaaaaaccatcttcaaactgtctggcagtggcggtcaatacattaaagcgaactcaaaattcattggtatcaccgaactggcgggctccggttcaatccaggaatattcggccagcctgtctacctacaatgaccaatcgattacgtttgttttcgaagatggcagctatgaaatctacgtcgaagacctgcgtaaaggtcaagaaaaagataaagttctgttccgctattacgacagtcagtccccgtcacacgaaacgggcgatgacgtggatggtcaaaccctgctggttaacctgagcccgacgaaagataaagactttctgctgcatgcaaacaatgaagaacactctgttgaactgcagaaaagtgaaaatcagctgccggatcaggcgtttttcctgctgcaccgcaaaagttccgaatcggtgagctttgaatctaaaaataatccgggcgtgttcattggtgttaaagataaccacctggcgctgatcaaagttggtgatcagaccaaagactcttacatcgaaaaaacgatcttcaaactgtctgccggcagtggttttaacaatttcaccgtgtccttctggctgcgcgtgccgaaagtttctgcaagtcatctggaatcaggcggttcatcgattcaggaatattccgcttcactgtcgacctacaatgaccaatctattacgtttgtgttcgaagatggcagttatgaaatctacgttgaagatctgcgtaagggccaagaaaaagataaagtcctgttccgctattacgatagccaatctccgagtcacgaaaccggcgatgacgtcgacggccagacgctgctggtgaacctgtctccgacgaaagacaaagactttctgctgcacgccaataatgaagaacactccgttgaactgcagaaatcagaaaaccaactgccggatcaagcctttttcctgttacaccgcaaaagctctgaatccgtctcatttgaatctaaaaataacccgggcgtcttcattggtgtgaaagataatcacctggccctgatcaaagttggcgaccaaacgaaagactcctatattgaaaaaacgatttttaaactgtccgcaggctcaggcttcaacaatttcaccgtgagtttctggctgcgcgtcccgaaagtgtcggctagccatctggaaggctcaggcggtcaatacatcaaagcgaacagcaaattcatcggcatcacggaactgtaatgaaagctt

SEQ ID NO: 56 - protein, 108 aa, Canis lupus familiaris
  MISC_FEATURE (1)..(108): SEQ ID NO: 56 is the amino acid sequence of canine IL-4.
HNFNITIKEIIKMLNILTARNDSCMELTVKDVFTAPKNTSDKEIFCRAATVLRQIYTHNCSNRYLRGLYRNLSSMANKTCSMNEIKKSTLKDFLERLKVIMQKKYYRH

SEQ ID NO: 57 - protein, 426 aa, Artificial sequence
  SEQ ID NO: 57 is the amino acid sequence of the cIL-4 polyprotein used for the vaccine construct of Example 13e.
HNFNITIKEIIKMLNILTARNDSCMELTVKDVFTAPKNTSDKEIFCRAATVLRQIYTHNCSNRYLRGLYRNLSSMANKTCSMNEIKKSTLKDFLERLKVIMQKKYYRHGSGGQYIKANSKFIGITELAGSGHNFNITIKEIIKMLNILTARNDSCMELTVKDVFTAPKNTSDKEIFCRAATVLRQIYTHNCSNRYLRGLYRNLSSMANKTCSMNEIKKSTLKDFLERLKVIMQKKYYRHAGSGFNNFTVSFWLRVPKVSASHLESGGSHNFNITIKEIIKMLNILTARNDSCMELTVKDVFTAPKNTSDKEIFCRAATVLRQIYTHNCSNRYLRGLYRNLSSMANKTCSMNEIKKSTLKDFLERLKVIMQKKYYRHAGSGFNNFTVSFWLRVPKVSASHLEGSGGQYIKANSKFIGITELHHHHHH

SEQ ID NO: 58 - DNA, 1362 bp, Artificial sequence
  SEQ ID NO: 58 is the nucleic acid sequence of the plasmid pcDNA3.4-cIL-5-poly encoding the cIL-4 polyprotein construct of Example 1e.
gaattcccgccgccaccatgggttggagttgcatcatcctatttctagtggccacagccaccggcgtgcactcgcacaacttcaacataacaatcaaagagatcatcaagatgctgaatattctgaccgccagaaacgattcctgcatggaactgacagtcaaggacgtgtttaccgctccaaagaacacctctgacaaggagatcttctgcagagctgctaccgtgctgcggcaaatctacacccacaactgcagcaaccggtacctgcggggcctgtaccggaacctgtcctctatggccaacaagacctgcagcatgaacgagatcaagaagtccaccctgaaggactttctggagcggctgaaggtcatcatgcagaagaaatattacaggcacggcagtggcggccagtacatcaaggccaattctaagttcatcggcatcaccgagctggccggctctggccacaacttcaacatcaccatcaaagagatcatcaagatgctgaacatcctgaccgcacggaacgactcttgcatggaactgaccgtgaaggacgtgttcactgctcctaagaacacctctgataaagaaatcttctgtagagccgctaccgtgctgagacagatctacacacataactgctccaacagatacctgagaggcctgtacagaaatctgtcctctatggccaacaagacctgttccatgaacgaaatcaaaaagtccaccctaaaggatttcctggaacggctgaaggtgatcatgcagaaaaagtactaccggcacgctggcagcggctttaacaactttacagtgtccttctggctgagagtgcctaaggtgtccgcctcccatttggagtccggcggatctcacaacttcaacatcaccatcaaggagatcatcaagatgctgaacatcctgaccgctcggaacgactcctgtatggaactcacagtgaaggacgtgttcaccgcccccaagaatacctccgacaaggagatcttctgcagagccgccacagttctgcggcagatctatacccacaattgctccaacagatacctcagaggcctgtaccgcaacctgagctccatggctaacaaaacctgctccatgaacgagatcaagaagagcaccctgaaagacttcctggagagactgaaggtgatcatgcagaagaagtactacagacacgccggatctggcttcaataacttcaccgtgtctttctggctgagagtgcctaaggtgtctgctagccacctggaaggttctggaggccagtacatcaaggccaactccaagttcatcggcattaccgagctgcaccatcaccaccaccactgataagctt

SEQ ID NO: 59 - DNA, 357 bp, Artificial sequence
  SEQ ID NO: 59 is the nucleic acid sequence of the bacterial expression plasmid pET30a-cIL-4 encoding the cIL-4 protein construct of Example 3f.
catatgcaccaccaccaccaccacaacttcaacataacaataaaggaaataatcaaaatgctgaacatcctgaccgcgcgtaacgatagctgcatggagctgaccgtgaaggacgttttcaccgcgccgaagaacaccagcgataaagaaatcttttgccgtgcggcgaccgtgctgcgtcagatttacacccacaactgcagcaaccgttacctgcgtggtctgtatcgtaacctgagcagcatggcgaacaaaacctgcagcatgaacgagatcaagaaaagcaccctgaaggatttcctggagcgcctgaaggttattatgcagaagaagtattaccgccactaatgaaagctt

SEQ ID NO: 60 - protein, 133 aa, Felis catus
  MISC_FEATURE (1)..(133): SEQ ID NO: 60 is the amino acid sequence of feline IL-31.
APAHRLQPSDVRKIILELRPMSKGLLQDYVSKEIGLPESNHSSLPCLSSDSQLPHINGSAILPYFRAIRPLSDKNTIDKIIEQLDKLKFQREPEAKVSMPADNFERKNFILAVLQQFSACLEHVLQSLNSGPQ

SEQ ID NO: 61 - protein, 501 aa, Artificial sequence
  SEQ ID NO: 61 is the amino acid sequence of the feline IL-31 polyprotein used for the vaccine construct of Example 13f.
APAHRLQPSDVRKIILELRPMSKGLLQDYVSKEIGLPESNHSSLPCLSSDSQLPHINGSAILPYFRAIRPLSDKNTIDKIIEQLDKLKFQREPEAKVSMPADNFERKNFILAVLQQFSACLEHVLQSLNSGPQGSGGQYIKANSKFIGITELAGSGAPAHRLQPSDVRKIILELRPMSKGLLQDYVSKEIGLPESNHSSLPCLSSDSQLPHINGSAILPYFRAIRPLSDKNTIDKIIEQLDKLKFQREPEAKVSMPADNFERKNFILAVLQQFSACLEHVLQSLNSGPQAGSGFNNFTVSFWLRVPKVSASHLESGGSAPAHRLQPSDVRKIILELRPMSKGLLQDYVSKEIGLPESNHSSLPCLSSDSQLPHINGSAILPYFRAIRPLSDKNTIDKIIEQLDKLKFQREPEAKVSMPADNFERKNFILAVLQQFSACLEHVLQSLNSGPQAGSGFNNFTVSFWLRVPKVSASHLEGSGGQYIKANSKFIGITELHHHHHH

SEQ ID NO: 62 - DNA, 7597 bp, Artificial sequence
  SEQ ID NO: 62 is the nucleic acid sequence of the plasmid pcDNA3.4-felIL31-poly encoding the feline IL-31 polyprotein construct of Example 1g.
gttaggcgttttgcgctgcttcgcgatgtacgggccagatatacgcgttgacattgattattgactagttattaatagtaatcaattacggggtcattagttcatagcccatatatggagttccgcgttacataacttacggtaaatggcccgcctggctgaccgcccaacgacccccgcccattgacgtcaataatgacgtatgttcccatagtaacgccaatagggactttccattgacgtcaatgggtggagtatttacggtaaactgcccacttggcagtacatcaagtgtatcatatgccaagtacgccccctattgacgtcaatgacggtaaatggcccgcctggcattatgcccagtacatgaccttatgggactttcctacttggcagtacatctacgtattagtcatcgctattaccatggtgatgcggttttggcagtacatcaatgggcgtggatagcggtttgactcacggggatttccaagtctccaccccattgacgtcaatgggagtttgttttggcaccaaaatcaacgggactttccaaaatgtcgtaacaactccgccccattgacgcaaatgggcggtaggcgtgtacggtgggaggtctatataagcagagctcgtttagtgaaccgtcagatcgcctggagacgccatccacgctgttttgacctccatagaagacaccgggaccgatccagcctccggactctagaggatcgaacccttgaattcccgccgccaccatgggatggtcctgcatcattctgttcctggtggccaccgccacaggcgtgcacagcgcccccgcccacagactgcaacctagcgacgtcaggaaaatcatcttggagctgagacctatgagcaaaggcctgctgcaggactacgtgtccaaagagattggcctgccagaatctaatcactctagcctgccttgcctgtctagcgacagccagctgccccacatcaacggctccgccatcctgccctactttagagccatcagacctctgtccgacaaaaacaccatcgacaagatcatcgagcagctggacaagctgaagttccagcgggaacccgaagccaaggtttccatgcctgctgataatttcgagagaaagaacttcatcctggctgtgctgcagcagttcagcgcttgcctggagcacgtgctgcagagcctgaatagcggacctcagggcagcggcggccagtacatcaaagccaattctaaattcatcggcatcaccgagctggccggcagcggcgcccctgctcacagactgcagcctagcgatgtgcggaagatcatcctggagctgagacctatgagcaagggcctgctgcaggactacgtgtccaaggaaatcggcctgcccgagagcaaccacagtagcctgccatgtctgagcagcgacagccagctgccacatatcaacggcagcgccatcctgccttacttcagagccatccggcctctgagcgacaagaacaccatcgacaagatcatcgagcagctggataagctgaaattccagagagagcctgaggccaaggtcagcatgcctgccgacaactttgagcggaagaattttatcctggccgtgctgcagcagttcagcgcctgcctggaacacgtgctgcaatctctgaacagcggcccccaggccggatctggcttcaacaacttcacagtgtctttttggctgcgggtgcccaaggtgtccgccagccacctggaaagcggcggatctgctccagctcacagactccagccttctgatgtgcggaagatcattctggaactcaggcccatgagcaagggcctgctgcaggattacgtgagcaaggaaatcggactgcctgagagcaaccacagcagcctgccttgtctgtccagcgatagccagctgccacacatcaacggctctgccattctgccttatttccgggccattagacccctgagcgacaagaacacaatcgataagatcatcgaacagctggacaagctgaagttccaaagagagcccgaggccaaggtgtccatgcccgccgacaacttcgagcgcaagaacttcatcctggctgtgctccagcaatttagcgcctgcctggaacacgtgctgcagagcctgaacagcggacctcaagccggctctggttttaacaacttcaccgtgtccttctggctgagagtgcctaaggtctctgcatctcatctggaaggcagcggcggccagtacatcaaggccaacagcaagttcatcggcatcaccgagctgcaccaccaccaccaccactgataagcttaagggttcgatccctaccggttagtaatgagtttgatatctcgacaatcaacctctggattacaaaatttgtgaaagattgactggtattcttaactatgttgctccttttacgctatgtggatacgctgctttaatgcctttgtatcatgctattgcttcccgtatggctttcattttctcctccttgtataaatcctggttgctgtctctttatgaggagttgtggcccgttgtcaggcaacgtggcgtggtgtgcactgtgtttgctgacgcaacccccactggttggggcattgccaccacctgtcagctcctttccgggactttcgctttccccctccctattgccacggcggaactcatcgccgcctgccttgcccgctgctggacaggggctcggctgttgggcactgacaattccgtggtgttgtcggggaagctgacgtcctttccatggctgctcgcctgtgttgccacctggattctgcgcgggacgtccttctgctacgtcccttcggccctcaatccagcggaccttccttcccgcggcctgctgccggctctgcggcctcttccgcgtcttcgccttcgccctcagacgagtcggatctccctttgggccgcctccccgcctggaacgggggaggctaactgaaacacggaaggagacaataccggaaggaacccgcgctatgacggcaataaaaagacagaataaaacgcacgggtgttgggtcgtttgttcataaacgcggggttcggtcccagggctggcactctgtcgataccccaccgagaccccattggggccaatacgcccgcgtttcttccttttccccaccccaccccccaagttcgggtgaaggcccagggctcgcagccaacgtcggggcggcaggccctgccatagcagatctgcgcagctggggctctagggggtatccccacgcgccctgtagcggcgcattaagcgcggcgggtgtggtggttacgcgcagcgtgaccgctacacttgccagcgccctagcgcccgctcctttcgctttcttcccttcctttctcgccacgttcgccggctttccccgtcaagctctaaatcgggggctccctttagggttccgatttagtgctttacggcacctcgaccccaaaaaacttgattagggtgatggttcacgtagtgggccatcgccctgatagacggtttttcgccctttgacgttggagtccacgttctttaatagtggactcttgttccaaactggaacaacactcaaccctatctcggtctattcttttgatttataagggattttgccgatttcggcctattggttaaaaaatgagctgatttaacaaaaatttaacgcgaattaattctgtggaatgtgtgtcagttagggtgtggaaagtccccaggctccccagcaggcagaagtatgcaaagcatgcatctcaattagtcagcaaccaggtgtggaaagtccccaggctccccagcaggcagaagtatgcaaagcatgcatctcaattagtcagcaaccatagtcccgcccctaactccgcccatcccgcccctaactccgcccagttccgcccattctccgccccatggctgactaattttttttatttatgcagaggccgaggccgcctctgcctctgagctattccagaagtagtgaggaggcttttttggaggcctaggcttttgcaaaaagctcccgggagcttgtatatccattttcggatctgatcaagagacaggatgaggatcgtttcgcatgattgaacaagatggattgcacgcaggttctccggccgcttgggtggagaggctattcggctatgactgggcacaacagacaatcggctgctctgatgccgccgtgttccggctgtcagcgcaggggcgcccggttctttttgtcaagaccgacctgtccggtgccctgaatgaactgcaggacgaggcagcgcggctatcgtggctggccacgacgggcgttccttgcgcagctgtgctcgacgttgtcactgaagcgggaagggactggctgctattgggcgaagtgccggggcaggatctcctgtcatctcaccttgctcctgccgagaaagtatccatcatggctgatgcaatgcggcggctgcatacgcttgatccggctacctgcccattcgaccaccaagcgaaacatcgcatcgagcgagcacgtactcggatggaagccggtcttgtcgatcaggatgatctggacgaagagcatcaggggctcgcgccagccgaactgttcgccaggctcaaggcgcgcatgcccgacggcgaggatctcgtcgtgacccatggcgatgcctgcttgccgaatatcatggtggaaaatggccgcttttctggattcatcgactgtggccggctgggtgtggcggaccgctatcaggacatagcgttggctacccgtgatattgctgaagagcttggcggcgaatgggctgaccgcttcctcgtgctttacggtatcgccgctcccgattcgcagcgcatcgccttctatcgccttcttgacgagttcttctgagcgggactctggggttcgcgaaatgaccgaccaagcgacgcccaacctgccatcacgagatttcgattccaccgccgccttctatgaaaggttgggcttcggaatcgttttccgggacgccggctggatgatcctccagcgcggggatctcatgctggagttcttcgcccaccccaacttgtttattgcagcttataatggttacaaataaagcaatagcatcacaaatttcacaaataaagcatttttttcactgcattctagttgtggtttgtccaaactcatcaatgtatcttatcatgtctgtataccgtcgacctctagctagagcttggcgtaatcatggtcatagctgtttcctgtgtgaaattgttatccgctcacaattccacacaacatacgagccggaagcataaagtgtaaagcctggggtgcctaatgagtgagctaactcacattaattgcgttgcgctcactgcccgctttccagtcgggaaacctgtcgtgccagctgcattaatgaatcggccaacgcgcggggagaggcggtttgcgtattgggcgctcttccgcttcctcgctcactgactcgctgcgctcggtcgttcggctgcggcgagcggtatcagctcactcaaaggcggtaatacggttatccacagaatcaggggataacgcaggaaagaacatgtgagcaaaaggccagcaaaaggccaggaaccgtaaaaaggccgcgttgctggcgtttttccataggctccgcccccctgacgagcatcacaaaaatcgacgctcaagtcagaggtggcgaaacccgacaggactataaagataccaggcgtttccccctggaagctccctcgtgcgctctcctgttccgaccctgccgcttaccggatacctgtccgcctttctcccttcgggaagcgtggcgctttctcatagctcacgctgtaggtatctcagttcggtgtaggtcgttcgctccaagctgggctgtgtgcacgaaccccccgttcagcccgaccgctgcgccttatccggtaactatcgtcttgagtccaacccggtaagacacgacttatcgccactggcagcagccactggtaacaggattagcagagcgaggtatgtaggcggtgctacagagttcttgaagtggtggcctaactacggctacactagaagaacagtatttggtatctgcgctctgctgaagccagttaccttcggaaaaagagttggtagctcttgatccggcaaacaaaccaccgctggtagcggtggtttttttgtttgcaagcagcagattacgcgcagaaaaaaaggatctcaagaagatcctttgatcttttctacggggtctgacgctcagtggaacgaaaactcacgttaagggattttggtcatgagattatcaaaaaggatcttcacctagatccttttaaattaaaaatgaagttttaaatcaatctaaagtatatatgagtaaacttggtctgacagttaccaatgcttaatcagtgaggcacctatctcagcgatctgtctatttcgttcatccatagttgcctgactccccgtcgtgtagataactacgatacgggagggcttaccatctggccccagtgctgcaatgataccgcgagacccacgctcaccggctccagatttatcagcaataaaccagccagccggaagggccgagcgcagaagtggtcctgcaactttatccgcctccatccagtctattaattgttgccgggaagctagagtaagtagttcgccagttaatagtttgcgcaacgttgttgccattgctacaggcatcgtggtgtcacgctcgtcgtttggtatggcttcattcagctccggttcccaacgatcaaggcgagttacatgatcccccatgttgtgcaaaaaagcggttagctccttcggtcctccgatcgttgtcagaagtaagttggccgcagtgttatcactcatggttatggcagcactgcataattctcttactgtcatgccatccgtaagatgcttttctgtgactggtgagtactcaaccaagtcattctgagaatagtgtatgcggcgaccgagttgctcttgcccggcgtcaatacgggataataccgcgccacatagcagaactttaaaagtgctcatcattggaaaacgttcttcggggcgaaaactctcaaggatcttaccgctgttgagatccagttcgatgtaacccactcgtgcacccaactgatcttcagcatcttttactttcaccagcgtttctgggtgagcaaaaacaggaaggcaaaatgccgcaaaaaagggaataagggcgacacggaaatgttgaatactcatactcttcctttttcaatattattgaagcatttatcagggttattgtctcatgagcggatacatatttgaatgtatttagaaaaataaacaaataggggttccgcgcacatttccccgaaaagtgccacctgacgtcgacggatcgggagatctcccgatcccctatggtgcactctcagtacaatctgctctgatgccgcatagttaagccagtatctgctccctgcttgtgtgttggaggtcgctgagtagtgcgcgagcaaaatttaagctacaacaaggcaaggcttgaccgacaattgcatgaagaatctgcttagg

SEQ ID NO: 63 - DNA, 6511 bp, Felis catus
  MISC_FEATURE (1)..(6511): SEQ ID NO: 63 is the nucleic acid sequence of the plasmid pcDNA3.4-fel-IL31 encoding the feline IL-31 protein construct of Example 3g.
gttaggcgttttgcgctgcttcgcgatgtacgggccagatatacgcgttgacattgattattgactagttattaatagtaatcaattacggggtcattagttcatagcccatatatggagttccgcgttacataacttacggtaaatggcccgcctggctgaccgcccaacgacccccgcccattgacgtcaataatgacgtatgttcccatagtaacgccaatagggactttccattgacgtcaatgggtggagtatttacggtaaactgcccacttggcagtacatcaagtgtatcatatgccaagtacgccccctattgacgtcaatgacggtaaatggcccgcctggcattatgcccagtacatgaccttatgggactttcctacttggcagtacatctacgtattagtcatcgctattaccatggtgatgcggttttggcagtacatcaatgggcgtggatagcggtttgactcacggggatttccaagtctccaccccattgacgtcaatgggagtttgttttggcaccaaaatcaacgggactttccaaaatgtcgtaacaactccgccccattgacgcaaatgggcggtaggcgtgtacggtgggaggtctatataagcagagctcgtttagtgaaccgtcagatcgcctggagacgccatccacgctgttttgacctccatagaagacaccgggaccgatccagcctccggactctagaggatcgaacccttgaattcccgccgccaccatgggctggagctgcatcatcctgttcctggtggccaccgccacaggcgtgcacagcgcccctgcccacagactgcagcctagcgacgtgcgcaagatcattctggagctcagacctatgagcaaaggactgctgcaggactacgtgtccaaggaaatcggcctgcctgagagcaaccactcttctctgccttgtctgagcagcgacagccagctgccccacatcaacggctccgctatccttccctactttagagccatccggccactgtctgataagaacaccatcgacaaaatcatcgagcagctggataagctgaagttccagcgggaacctgaggccaaggtcagcatgccagccgacaacttcgagagaaagaatttcatcctggccgtgctgcaacagttcagcgcttgcctggaacacgtgctgcagagcctgaactccggcccccagcaccaccaccaccatcactgataagcttaagggttcgatccctaccggttagtaatgagtttgatatctcgacaatcaacctctggattacaaaatttgtgaaagattgactggtattcttaactatgttgctccttttacgctatgtggatacgctgctttaatgcctttgtatcatgctattgcttcccgtatggctttcattttctcctccttgtataaatcctggttgctgtctctttatgaggagttgtggcccgttgtcaggcaacgtggcgtggtgtgcactgtgtttgctgacgcaacccccactggttggggcattgccaccacctgtcagctcctttccgggactttcgctttccccctccctattgccacggcggaactcatcgccgcctgccttgcccgctgctggacaggggctcggctgttgggcactgacaattccgtggtgttgtcggggaagctgacgtcctttccatggctgctcgcctgtgttgccacctggattctgcgcgggacgtccttctgctacgtcccttcggccctcaatccagcggaccttccttcccgcggcctgctgccggctctgcggcctcttccgcgtcttcgccttcgccctcagacgagtcggatctccctttgggccgcctccccgcctggaacgggggaggctaactgaaacacggaaggagacaataccggaaggaacccgcgctatgacggcaataaaaagacagaataaaacgcacgggtgttgggtcgtttgttcataaacgcggggttcggtcccagggctggcactctgtcgataccccaccgagaccccattggggccaatacgcccgcgtttcttccttttccccaccccaccccccaagttcgggtgaaggcccagggctcgcagccaacgtcggggcggcaggccctgccatagcagatctgcgcagctggggctctagggggtatccccacgcgccctgtagcggcgcattaagcgcggcgggtgtggtggttacgcgcagcgtgaccgctacacttgccagcgccctagcgcccgctcctttcgctttcttcccttcctttctcgccacgttcgccggctttccccgtcaagctctaaatcgggggctccctttagggttccgatttagtgctttacggcacctcgaccccaaaaaacttgattagggtgatggttcacgtagtgggccatcgccctgatagacggtttttcgccctttgacgttggagtccacgttctttaatagtggactcttgttccaaactggaacaacactcaaccctatctcggtctattcttttgatttataagggattttgccgatttcggcctattggttaaaaaatgagctgatttaacaaaaatttaacgcgaattaattctgtggaatgtgtgtcagttagggtgtggaaagtccccaggctccccagcaggcagaagtatgcaaagcatgcatctcaattagtcagcaaccaggtgtggaaagtccccaggctccccagcaggcagaagtatgcaaagcatgcatctcaattagtcagcaaccatagtcccgcccctaactccgcccatcccgcccctaactccgcccagttccgcccattctccgccccatggctgactaattttttttatttatgcagaggccgaggccgcctctgcctctgagctattccagaagtagtgaggaggcttttttggaggcctaggcttttgcaaaaagctcccgggagcttgtatatccattttcggatctgatcaagagacaggatgaggatcgtttcgcatgattgaacaagatggattgcacgcaggttctccggccgcttgggtggagaggctattcggctatgactgggcacaacagacaatcggctgctctgatgccgccgtgttccggctgtcagcgcaggggcgcccggttctttttgtcaagaccgacctgtccggtgccctgaatgaactgcaggacgaggcagcgcggctatcgtggctggccacgacgggcgttccttgcgcagctgtgctcgacgttgtcactgaagcgggaagggactggctgctattgggcgaagtgccggggcaggatctcctgtcatctcaccttgctcctgccgagaaagtatccatcatggctgatgcaatgcggcggctgcatacgcttgatccggctacctgcccattcgaccaccaagcgaaacatcgcatcgagcgagcacgtactcggatggaagccggtcttgtcgatcaggatgatctggacgaagagcatcaggggctcgcgccagccgaactgttcgccaggctcaaggcgcgcatgcccgacggcgaggatctcgtcgtgacccatggcgatgcctgcttgccgaatatcatggtggaaaatggccgcttttctggattcatcgactgtggccggctgggtgtggcggaccgctatcaggacatagcgttggctacccgtgatattgctgaagagcttggcggcgaatgggctgaccgcttcctcgtgctttacggtatcgccgctcccgattcgcagcgcatcgccttctatcgccttcttgacgagttcttctgagcgggactctggggttcgcgaaatgaccgaccaagcgacgcccaacctgccatcacgagatttcgattccaccgccgccttctatgaaaggttgggcttcggaatcgttttccgggacgccggctggatgatcctccagcgcggggatctcatgctggagttcttcgcccaccccaacttgtttattgcagcttataatggttacaaataaagcaatagcatcacaaatttcacaaataaagcatttttttcactgcattctagttgtggtttgtccaaactcatcaatgtatcttatcatgtctgtataccgtcgacctctagctagagcttggcgtaatcatggtcatagctgtttcctgtgtgaaattgttatccgctcacaattccacacaacatacgagccggaagcataaagtgtaaagcctggggtgcctaatgagtgagctaactcacattaattgcgttgcgctcactgcccgctttccagtcgggaaacctgtcgtgccagctgcattaatgaatcggccaacgcgcggggagaggcggtttgcgtattgggcgctcttccgcttcctcgctcactgactcgctgcgctcggtcgttcggctgcggcgagcggtatcagctcactcaaaggcggtaatacggttatccacagaatcaggggataacgcaggaaagaacatgtgagcaaaaggccagcaaaaggccaggaaccgtaaaaaggccgcgttgctggcgtttttccataggctccgcccccctgacgagcatcacaaaaatcgacgctcaagtcagaggtggcgaaacccgacaggactataaagataccaggcgtttccccctggaagctccctcgtgcgctctcctgttccgaccctgccgcttaccggatacctgtccgcctttctcccttcgggaagcgtggcgctttctcatagctcacgctgtaggtatctcagttcggtgtaggtcgttcgctccaagctgggctgtgtgcacgaaccccccgttcagcccgaccgctgcgccttatccggtaactatcgtcttgagtccaacccggtaagacacgacttatcgccactggcagcagccactggtaacaggattagcagagcgaggtatgtaggcggtgctacagagttcttgaagtggtggcctaactacggctacactagaagaacagtatttggtatctgcgctctgctgaagccagttaccttcggaaaaagagttggtagctcttgatccggcaaacaaaccaccgctggtagcggtggtttttttgtttgcaagcagcagattacgcgcagaaaaaaaggatctcaagaagatcctttgatcttttctacggggtctgacgctcagtggaacgaaaactcacgttaagggattttggtcatgagattatcaaaaaggatcttcacctagatccttttaaattaaaaatgaagttttaaatcaatctaaagtatatatgagtaaacttggtctgacagttaccaatgcttaatcagtgaggcacctatctcagcgatctgtctatttcgttcatccatagttgcctgactccccgtcgtgtagataactacgatacgggagggcttaccatctggccccagtgctgcaatgataccgcgagacccacgctcaccggctccagatttatcagcaataaaccagccagccggaagggccgagcgcagaagtggtcctgcaactttatccgcctccatccagtctattaattgttgccgggaagctagagtaagtagttcgccagttaatagtttgcgcaacgttgttgccattgctacaggcatcgtggtgtcacgctcgtcgtttggtatggcttcattcagctccggttcccaacgatcaaggcgagttacatgatcccccatgttgtgcaaaaaagcggttagctccttcggtcctccgatcgttgtcagaagtaagttggccgcagtgttatcactcatggttatggcagcactgcataattctcttactgtcatgccatccgtaagatgcttttctgtgactggtgagtactcaaccaagtcattctgagaatagtgtatgcggcgaccgagttgctcttgcccggcgtcaatacgggataataccgcgccacatagcagaactttaaaagtgctcatcattggaaaacgttcttcggggcgaaaactctcaaggatcttaccgctgttgagatccagttcgatgtaacccactcgtgcacccaactgatcttcagcatcttttactttcaccagcgtttctgggtgagcaaaaacaggaaggcaaaatgccgcaaaaaagggaataagggcgacacggaaatgttgaatactcatactcttcctttttcaatattattgaagcatttatcagggttattgtctcatgagcggatacatatttgaatgtatttagaaaaataaacaaataggggttccgcgcacatttccccgaaaagtgccacctgacgtcgacggatcgggagatctcccgatcccctatggtgcactctcagtacaatctgctctgatgccgcatagttaagccagtatctgctccctgcttgtgtgttggaggtcgctgagtagtgcgcgagcaaaatttaagctacaacaaggcaaggcttgaccgacaattgcatgaagaatctgcttagg

SEQ ID NO: 64 - protein, 157 aa, Bos taurus
  MISC_FEATURE (1)..(157): SEQ ID NO: 64 is the amino acid sequence of bovine TNF-alpha.
LRSSSQASSNKPVAHVVADINSPGQLRWWDSYANALMANGVKLEDNQLVVPADGLYLIYSQVLFRGQGCPSTPLFLTHTISRIAVSYQTKVNILSAIKSPCHRETPEWAEAKPWYEPIYQGGVFQLEKGDRLSAEINLPDYLDYAESGQVYFGIIAL

SEQ ID NO: 65 - protein, 586 aa, Artificial Sequence
  SEQ ID NO: 65 is the amino acid sequence of the bovine TNF-alpha polyprotein used for the immunization of Example 6f.
MHHHHHHLRSSSQASSNKPVAHVVADINSPGQLRWWDSYANALMANGVKLEDNQLVVPADGLYLIYSQVLFRGQGCPSTPLFLTHTISRIAVSYQTKVNILSAIKSPCHRETPEWAEAKPWYEPIYQGGVFQLEKGDRLSAEINLPDYLDYAESGQVYFGIIALGGSGGSFNNFTVSFWLRVPKVSASHLEGSGGSGLRSSSQASSNKPVAHVVADINSPGQLRWWDSYANALMANGVKLEDNQLVVPADGLYLIYSQVLFRGQGCPSTPLFLTHTISRIAVSYQTKVNILSAIKSPCHRETPEWAEAKPWYEPIYQGGVFQLEKGDRLSAEINLPDYLDYAESGQVYFGIIALGGSGGGQYIKANSKFIGITELGGGSGGLRSSSQASSNKPVAHVVADINSPGQLRWWDSYANALMANGVKLEDNQLVVPADGLYLIYSQVLFRGQGCPSTPLFLTHTISRIAVSYQTKVNILSAIKSPCHRETPEWAEAKPWYEPIYQGGVFQLEKGDRLSAEINLPDYLDYAESGQVYFGIIALGGSGGSFNNFTVSFWLRVPKVSASHLEGGSGGGQYIKANSKFIGITEL

SEQ ID NO: 66 - DNA, 7017 bp, Artificial sequence
  SEQ ID NO: 66 is the nucleic acid sequence of the bacterial expression plasmid pET30a-bov-TNF-alpha-poly encoding the bovine TNF-alpha polyprotein construct of Example 1h.
atccggatatagttcctcctttcagcaaaaaacccctcaagacccgtttagaggccccaaggggttatgctagttattgctcagcggtggcagcagccaactcagcttcctttcgggctttgttagcagccggatctcagtggtggtggtggtggtgctcgagtgcggccgcaagctttcattacagctcggtgatgccgataaacttgctattcgccttgatgtattggccgccgccgctaccaccctccaggtggcttgcgctaaccttcggcacacgtaaccaaaagctaacggtgaaattattgaagctgccaccgctgccacccagagctataataccaaaataaacttggccgctttccgcgtagtccaggtaatccggcaggttaatttccgcagataaacgatcacccttctccagctggaaaacgccaccctgataaatcggctcgtaccacggtttcgcttcagcccattccggggtttcgcgatgacaaggagatttgatcgcgctcaggatattcactttagtctggtagctcaccgcaatgcggctaatggtatgcgtcagaaacagcggggtactaggacatccctggccgcgaaacagaacttggctgtaaatcagatacaggccgtctgccggcacaaccagctggttatcctccagtttcacaccgttcgccattaaagcattcgcgtagctgtcccaccaacgcagttggcccgggctgttaatgtccgcaacaacatgcgccaccggtttgttagagctcgcctgagaactagagcgcaggccaccgctgccaccgcccagttcggtaataccgataaatttgctgttcgccttgatatattgaccgccaccgctgccacccagagcgataataccaaaataaacctgaccgctctccgcgtagtccagataatccggcaggttgatttccgcgctcagacggtcacctttttccagttgaaacacgccaccctggtaaatcggctcataccacggtttcgcttccgcccactccggggtttcgcgatggcacgggctcttgatcgcgctcagaatattcactttggtctggtagctcaccgcgatgcggctaatggtatgagtcagaaacagcggggtagaaggacagccctggccgcgaaacagcacttggctgtaaatcaggtacaggccatcagccggcacaaccagctgattatcctccagtttcacgccattcgccatcagcgcattcgcgtagctatcccaccaacgcagctggcccgggctgttgatgtccgcaaccacgtgcgcaaccggtttgttgctgctcgcctggctagaagagcgcaggccgctgccaccgctaccttccagatggctcgcgctaaccttcggcacacgcagccaaaagctaacggtaaagttgttgaagctgccaccgctgccacccagcgcaatgatgccgaagtacacctgaccgctctccgcataatccaggtagtccggcaggttaatctccgcgctcagacgatcacctttttccagttggaacacgccaccctgatagatcggttcgtaccacggcttcgcctccgcccattccggggtttcacggtggcacgggcttttaatcgcgctcaggatgttaaccttggtttgatagctcaccgcaatacggctgatggtgtgggtcagaaacagcggggtgctcgggcaaccttgaccacgaaacagaacctggctatagatcaggtacaggccatccgccggcacaaccagctggttgtcttccagcttcacaccgttcgccatcagcgcgttcgcgtagctgtcccaccaacgcagttgacccgggctattgatgtccgccactacgtgagctacgggtttatttgaactagcttgtgaacttgaccttaggtggtgatggtgatgatgcatatgtatatctccttcttaaagttaaacaaaattatttctagaggggaattgttatccgctcacaattcccctatagtgagtcgtattaatttcgcgggatcgagatcgatctcgatcctctacgccggacgcatcgtggccggcatcaccggcgccacaggtgcggttgctggcgcctatatcgccgacatcaccgatggggaagatcgggctcgccacttcgggctcatgagcgcttgtttcggcgtgggtatggtggcaggccccgtggccgggggactgttgggcgccatctccttgcatgcaccattccttgcggcggcggtgctcaacggcctcaacctactactgggctgcttcctaatgcaggagtcgcataagggagagcgtcgagatcccggacaccatcgaatggcgcaaaacctttcgcggtatggcatgatagcgcccggaagagagtcaattcagggtggtgaatgtgaaaccagtaacgttatacgatgtcgcagagtatgccggtgtctcttatcagaccgtttcccgcgtggtgaaccaggccagccacgtttctgcgaaaacgcgggaaaaagtggaagcggcgatggcggagctgaattacattcccaaccgcgtggcacaacaactggcgggcaaacagtcgttgctgattggcgttgccacctccagtctggccctgcacgcgccgtcgcaaattgtcgcggcgattaaatctcgcgccgatcaactgggtgccagcgtggtggtgtcgatggtagaacgaagcggcgtcgaagcctgtaaagcggcggtgcacaatcttctcgcgcaacgcgtcagtgggctgatcattaactatccgctggatgaccaggatgccattgctgtggaagctgcctgcactaatgttccggcgttatttcttgatgtctctgaccagacacccatcaacagtattattttctcccatgaagacggtacgcgactgggcgtggagcatctggtcgcattgggtcaccagcaaatcgcgctgttagcgggcccattaagttctgtctcggcgcgtctgcgtctggctggctggcataaatatctcactcgcaatcaaattcagccgatagcggaacgggaaggcgactggagtgccatgtccggttttcaacaaaccatgcaaatgctgaatgagggcatcgttcccactgcgatgctggttgccaacgatcagatggcgctgggcgcaatgcgcgccattaccgagtccgggctgcgcgttggtgcggacatctcggtagtgggatacgacgataccgaagacagctcatgttatatcccgccgttaaccaccatcaaacaggattttcgcctgctggggcaaaccagcgtggaccgcttgctgcaactctctcagggccaggcggtgaagggcaatcagctgttgcccgtctcactggtgaaaagaaaaaccaccctggcgcccaatacgcaaaccgcctctccccgcgcgttggccgattcattaatgcagctggcacgacaggtttcccgactggaaagcgggcagtgagcgcaacgcaattaatgtaagttagctcactcattaggcaccgggatctcgaccgatgcccttgagagccttcaacccagtcagctccttccggtgggcgcggggcatgactatcgtcgccgcacttatgactgtcttctttatcatgcaactcgtaggacaggtgccggcagcgctctgggtcattttcggcgaggaccgctttcgctggagcgcgacgatgatcggcctgtcgcttgcggtattcggaatcttgcacgccctcgctcaagccttcgtcactggtcccgccaccaaacgtttcggcgagaagcaggccattatcgccggcatggcggccccacgggtgcgcatgatcgtgctcctgtcgttgaggacccggctaggctggcggggttgccttactggttagcagaatgaatcaccgatacgcgagcgaacgtgaagcgactgctgctgcaaaacgtctgcgacctgagcaacaacatgaatggtcttcggtttccgtgtttcgtaaagtctggaaacgcggaagtcagcgccctgcaccattatgttccggatctgcatcgcaggatgctgctggctaccctgtggaacacctacatctgtattaacgaagcgctggcattgaccctgagtgatttttctctggtcccgccgcatccataccgccagttgtttaccctcacaacgttccagtaaccgggcatgttcatcatcagtaacccgtatcgtgagcatcctctctcgtttcatcggtatcattacccccatgaacagaaatcccccttacacggaggcatcagtgaccaaacaggaaaaaaccgcccttaacatggcccgctttatcagaagccagacattaacgcttctggagaaactcaacgagctggacgcggatgaacaggcagacatctgtgaatcgcttcacgaccacgctgatgagctttaccgcagctgcctcgcgcgtttcggtgatgacggtgaaaacctctgacacatgcagctcccggagacggtcacagcttgtctgtaagcggatgccgggagcagacaagcccgtcagggcgcgtcagcgggtgttggcgggtgtcggggcgcagccatgacccagtcacgtagcgatagcggagtgtatactggcttaactatgcggcatcagagcagattgtactgagagtgcaccatatatgcggtgtgaaataccgcacagatgcgtaaggagaaaataccgcatcaggcgctcttccgcttcctcgctcactgactcgctgcgctcggtcgttcggctgcggcgagcggtatcagctcactcaaaggcggtaatacggttatccacagaatcaggggataacgcaggaaagaacatgtgagcaaaaggccagcaaaaggccaggaaccgtaaaaaggccgcgttgctggcgtttttccataggctccgcccccctgacgagcatcacaaaaatcgacgctcaagtcagaggtggcgaaacccgacaggactataaagataccaggcgtttccccctggaagctccctcgtgcgctctcctgttccgaccctgccgcttaccggatacctgtccgcctttctcccttcgggaagcgtggcgctttctcatagctcacgctgtaggtatctcagttcggtgtaggtcgttcgctccaagctgggctgtgtgcacgaaccccccgttcagcccgaccgctgcgccttatccggtaactatcgtcttgagtccaacccggtaagacacgacttatcgccactggcagcagccactggtaacaggattagcagagcgaggtatgtaggcggtgctacagagttcttgaagtggtggcctaactacggctacactagaaggacagtatttggtatctgcgctctgctgaagccagttaccttcggaaaaagagttggtagctcttgatccggcaaacaaaccaccgctggtagcggtggtttttttgtttgcaagcagcagattacgcgcagaaaaaaaggatctcaagaagatcctttgatcttttctacggggtctgacgctcagtggaacgaaaactcacgttaagggattttggtcatgaacaataaaactgtctgcttacataaacagtaatacaaggggtgttatgagccatattcaacgggaaacgtcttgctctaggccgcgattaaattccaacatggatgctgatttatatgggtataaatgggctcgcgataatgtcgggcaatcaggtgcgacaatctatcgattgtatgggaagcccgatgcgccagagttgtttctgaaacatggcaaaggtagcgttgccaatgatgttacagatgagatggtcagactaaactggctgacggaatttatgcctcttccgaccatcaagcattttatccgtactcctgatgatgcatggttactcaccactgcgatccccgggaaaacagcattccaggtattagaagaatatcctgattcaggtgaaaatattgttgatgcgctggcagtgttcctgcgccggttgcattcgattcctgtttgtaattgtccttttaacagcgatcgcgtatttcgtctcgctcaggcgcaatcacgaatgaataacggtttggttgatgcgagtgattttgatgacgagcgtaatggctggcctgttgaacaagtctggaaagaaatgcataaacttttgccattctcaccggattcagtcgtcactcatggtgatttctcacttgataaccttatttttgacgaggggaaattaataggttgtattgatgttggacgagtcggaatcgcagaccgataccaggatcttgccatcctatggaactgcctcggtgagttttctccttcattacagaaacggctttttcaaaaatatggtattgataatcctgatatgaataaattgcagtttcatttgatgctcgatgagtttttctaagaattaattcatgagcggatacatatttgaatgtatttagaaaaataaacaaataggggttccgcgcacatttccccgaaaagtgccacctgaaattgtaaacgttaatattttgttaaaattcgcgttaaatttttgttaaatcagctcattttttaaccaataggccgaaatcggcaaaatcccttataaatcaaaagaatagaccgagatagggttgagtgttgttccagtttggaacaagagtccactattaaagaacgtggactccaacgtcaaagggcgaaaaaccgtctatcagggcgatggcccactacgtgaaccatcaccctaatcaagttttttggggtcgaggtgccgtaaagcactaaatcggaaccctaaagggagcccccgatttagagcttgacggggaaagccggcgaacgtggcgagaaaggaagggaagaaagcgaaaggagcgggcgctagggcgctggcaagtgtagcggtcacgctgcgcgtaaccaccacacccgccgcgcttaatgcgccgctacagggcgcgtcccattcgcca

SEQ ID NO: 67 - protein, 19 aa, Artificial sequence
  SEQ ID NO: 67 is the amino acid sequence of the artificial ER import signal used for mammalian expression in the given examples.
MGWSCIILFLVATATGVHS

SEQ ID NO: 68 - protein, 138 aa, Sus scrofa
  MISC_FEATURE (1)..(138): This is the amino acid sequence of Pig IL-31 protein.
MAPTSVPSPEEQKGIIKELQASVKKVLKDYEEKEKGVQEQERFQIPCLTFNPQSPHNIESSAILPYLRAIKRSFDNDDDIIDIINHLHKLKFQQGPETTVPVPTNSFEGKSFTLSILKAFSKCLTSDFNSHDPRRGQS

SEQ ID NO: 69 - protein, 141 aa, Homo sapiens [sequence omitted]

SEQ ID NO: 70 - protein, 109 aa, Felis catus
  MISC_FEATURE (1)..(109): This is the amino acid sequence of Cat IL-4 protein.
QNFNNTLKEIIKTLNILTARNDSCMELTVMDVLAAPKNTSDKEIFCRATTVLRQIYTHHNCSTKFLKGLDRNLSSMANRTCSVNEVKKCTLKDFLERLKAIMQKKYSKH

SEQ ID NO: 71 - protein, 109 aa, Sus scrofa
  MISC_FEATURE (1)..(109): This is the amino acid sequence of Pig IL-4 protein.
HKCDITLQEIIKTLNILTARKNSCMELPVTDVFAAPENTTEKETFCRASTVLRHIYRHHTCMKSLLSGLDRNLSSMANMTCSVHEAKKSTLKDFLERLKTIMKEKYSKC

SEQ ID NO: 72 - protein, 116 aa, Gallus gallus
  MISC_FEATURE (1)..(116): This is the amino acid sequence of Chicken IL-4 protein.
VPMLCLQLSVPLMESIRIVNDIQGEVSCVKMNVTDIFADNKTNNKTELLCKASTIVWESQHCHKNLQGLFLNMRQLLNASSTSLKAPCPTAAGNTTSMEKFLADLRTFFHQLAKNK

SEQ ID NO: 73 - protein, 111 aa, Bos taurus
  MISC_FEATURE (1)..(111): This is the amino acid sequence of Bovine IL-4 protein.
HKCDITLAEIIKTLNILTTRKNSCMELPVADVFAAPKNTTEKETFCRVGIELRRIYRSHTCLNKFLGGLDRNLNSLASKTCSVNEAKTSTSTLKDLLERLKTIMKEKYSKC

SEQ ID NO: 74 - protein, 129 aa, Homo sapiens [sequence omitted]

SEQ ID NO: 75 - protein, 113 aa, Homo sapiens
  MISC_FEATURE (1)..(113): This is the amino acid sequence of Human IL-4 Isoform 2 protein.
HKCDITLQEIIKTLNSLTEQKNTTEKETFCRAATVLRQFYSHHEKDTRCLGATAQQFHRHKQLIRFLKRLDRNLWGLAGLNSCPVKEANQSTLENFLERLKTIMREKYSKCSS

SEQ ID NO: 76 - protein, 115 aa, Felis catus
  MISC_FEATURE (1)..(115): This is the amino acid sequence of Cat IL-5 protein.
IAVQSPMNRLVAETLALLSTHRTLLIGDGNLMIPTPEHNNHQLCIEEVFQGIDTLKNRTVPGDAVEKLFRNLSLIKEHIDRQKKKCGGERWRVKKFLDYLQVFLGVINTEWTMES

SEQ ID NO: 77 - protein, 113 aa, Sus scrofa
  MISC_FEATURE (1)..(113): This is the amino acid sequence of Pig IL-5 protein.
VENTMNRLVAETLTLLSIHRTLLIGDGNLMISTPVHTNHQLCIEEVFQGIDTLKNQTARGDAVEKLFQNLSLIKEYIDRQKKNCGGERWRVTQFLDYLQVFLGVINTEWTMES

SEQ ID NO: 78 - protein, 110 aa, Gallus gallus
  MISC_FEATURE (1)..(110): This is the amino acid sequence of Chicken IL-5, 126 aa protein.
TPLRSNLAELQTWLQQIYQSVDMLNLRIETPVSADDENCIKTLFEGTALLKNNPEMRRFGTFFQSFDKLRPSLTAQLTGEGECDTERKNVKKFIEKLRTFIRKLSRDARV

SEQ ID NO: 79 - protein, 120 aa, Gallus gallus
  MISC_FEATURE (1)..(120): This is the amino acid sequence of Chicken IL-5, 136 aa protein.
TPLRSNLAELQTWLQQIYQSVDMLVSSIFYFCSMNLRIETPVSADDENCIKTLFEGTALLKNNPEMRRFGTFFQSFDKLRPSLTAQLTGEGECDTERKNVKKFIEKLRTFIRKLSRDARV

SEQ ID NO: 80 - protein, 113 aa, Bos taurus
  MISC_FEATURE (1)..(113): This is the amino acid sequence of Bovine IL-5 protein.
VESTMNRLVAETLTLLSSHRTLLIGDGNLMIPTPQHTNHQLCIEEVFQGIDTLKNQTAQGDAVKKIFQNLSLIKEYIDLQKRKCGGERWRVKQFLDYLQVFLGVINTEWTMES

SEQ ID NO: 81 - protein, 115 aa, Homo sapiens
  MISC_FEATURE (1)..(115): This is the amino acid sequence of Human IL-5 protein.
IPTEIPTSALVKETLALLSTHRTLLIANETLRIPVPVHKNHQLCTEEIFQGIGTLESQTVQGGTVERLFKNLSLIKKYIDGQKKKCGEERRRVNQFLDYLQEFLGVMNTEWIIES

SEQ ID NO: 82 - protein, 112 aa, Felis catus
  MISC_FEATURE (1)..(112): This is the amino acid sequence of Cat IL-13 protein.
SPGPHSRRELKELIEELVNITQNQVSLCNGSMVWSVNLTTGMYCAALESLINVSDCTAIQRTQRMLKALCTQKPSAGQTASERSRDTKIEVIQLVKNLLNHLRRNFRHGNFK

SEQ ID NO: 83 - protein, 113 aa, Sus scrofa
  MISC_FEATURE (1)..(113): This is the amino acid sequence of Pig IL-13 protein.
SPGPVPPHSTALKELIEELVNITQNQKTPLCNGSMVWSVNLTTSMQYCAALESLINISDCSAIQKTQRMLSALCSHKPPSEQVPGKHIRDTKIEVAQFVKDLLKHLRMIFRHG

SEQ ID NO: 84 - protein, 101 aa, Gallus gallus
  MISC_FEATURE (1)..(101): This is the amino acid sequence of Chicken IL-13 protein.
TPLAMNLSKLKLSDITQGIQKLNRGVQLSEQELLCQAATVLDNMTDCKKDYEPLITSLKSLHGMTNCPPSTDNEIYLRNFLPALGNYTQALYRRISATAAN

SEQ ID NO: 85 - protein, 114 aa, Bos taurus
  MISC_FEATURE (1)..(114): This is the amino acid sequence of Bovine IL-13 protein.
SPSPVPSATALKELIEELVNITQNQKVPLCNGSMVWSLNLTSSMYCAALDSLISISNCSVIQRTKRMLNALCPHKPSAKQVSSEYVRDTKIEVAQFLKDLLRHSRIVFRNERFN

SEQ ID NO: 86 - protein, 122 aa, Homo sapiens
  MISC_FEATURE (1)..(122): This is the amino acid sequence of Human IL-13 protein.
LTCLGGFASPGPVPPSTALRELIEELVNITQNQKAPLCNGSMVWSINLTAGMYCAALESLINVSGCSAIEKTQRMLSGFCPHKVSAGQFSSLHVRDTKIEVAQFVKDLLLHLKKLFREGRFN

SEQ ID NO: 87 - protein, 246 aa, Felis catus
  MISC_FEATURE (1)..(246): This is the amino acid sequence of Cat IL-33 canonical isoform protein.
MKTKMEYSTTKISPAKMNSSAGKALVKSPKLGKSQQKAEEVCQMYFMQLRSGLIKKTACYFKKETTKRHSTRRAGKYKEHLVFTARHQQLERPVEGLAFGVPMVQKCFGTTDVPSIQEYSASLSTYNDQSITFVFEDGSYEIYVEDLGKDQEKDKVLFRYYDFQSPSRETGDADDGHTLLVNLSPTKDKDFLLHANNKEHSVELQKCKKPLPDQAFFRLHRKSSKCVSFECRPAPPFPPDLRILGR

SEQ ID NO: 88 - protein, 117 aa, Felis catus
  MISC_FEATURE (1)..(117): This is the amino acid sequence of alternative form of Cat IL-33 canonical isoform protein.
SITFVFEDGSYEIYVEDLGKDQEKDKVLFRYYDFQSPSRETGDADDGHTLLVNLSPTKDKDFLLHANNKEHSVELQKCKKPLPDQAFFRLHRKSSKCVSFECRPAPPFPPDLRILGR

SEQ ID NO: 89 - protein, 268 aa, Felis catus
  MISC_FEATURE (1)..(268): This is the amino acid sequence of Cat IL-33 Isoform 268 aa protein.
MKTKMEYSTTKISPAKMNSSAGKALVKSPKLGKSQQKAEEVCQMYFMQLRSGLIKKTACYFKKETTKRHSTRRAGKYKEHLVFTARHQQLERPVEGLAFGVPMVQKCFGTTDVPSIQEYSASLSTYNDQSITFVFEDGSYEIYVEDLGKDQEKDKVLFRYYDFQSPSRETGDADDGHTLLVNLSPTKDKDFLLHANNKEHSVELQKCKKPLPDQAFFRLHRKSSKCVSFECKNDPGVFIGVKDNHLALIKVEDQTEYFSTENIIFKLS

SEQ ID NO: 90 - protein, 139 aa, Felis catus
  MISC_FEATURE (1)..(139): This is the amino acid sequence of alternative fomr of Cat IL-33 Isoform 268 aa protein.
SITFVFEDGSYEIYVEDLGKDQEKDKVLFRYYDFQSPSRETGDADDGHTLLVNLSPTKDKDFLLHANNKEHSVELQKCKKPLPDQAFFRLHRKSSKCVSFECKNDPGVFIGVKDNHLALIKVEDQTEYFSTENIIFKLS

SEQ ID NO: 91 - protein, 276 aa, Sus scrofa
  MISC_FEATURE (1)..(276): This is the amino acid sequence of Pig IL-33 (K7GS29) protein.
MKPEVKYSTTKISTAKMNSSAGKVSIKSPKLRKSQQKAKEVCQMYFMQLRSGLIIEKKACYFGKETTKRHSPTKGKKCKKQPLVLAACQQQLGHLERSVEGFTFTNTMVQKYTTATNLLSIKEHSASLSTYNDQYITFAFEDGSYEIYVEDLRKDQEKDKVLLRYYDSQIPSSETDGGGDHRKLMVNLSPTKDKDFLLHANSKEHSVELQKCENPLPEQAFFVLHEQPSKCVSFECKSHPGVFLGVKNNQLALIKLGEHPEDSNRENTTFKLSNLM

SEQ ID NO: 92 - protein, 142 aa, Sus scrofa
  MISC_FEATURE (1)..(142): This is the amino acid sequence of Pig IL-33 thought to be the probable mature sequence of K7GS29.
YITFAFEDGSYEIYVEDLRKDQEKDKVLLRYYDSQIPSSETDGGGDHRKLMVNLSPTKDKDFLLHANSKEHSVELQKCENPLPEQAFFVLHEQPSKCVSFECKSHPGVFLGVKNNQLALIKLGEHPEDSNRENTTFKLSNLM

SEQ ID NO: 93 - protein, 259 aa, Sus scrofa
  MISC_FEATURE (1)..(259): This is another amino acid sequence of Pig IL-33 (K7GRC7).
MKPEVKYSTTKISTAKMNSSAGKVSIKSPKLRKSQQKAKEVCQMYFMQLRSGLIIEKKACYFGKETTKRHSPTKGKKCKKQPLVLAACQQQLGHLERSVEGFTFTNTMVQKYTTATNLLSIKEHSASLSTYNDQYITFAFEDGSYEIYVEDLRKDQEKDGGGDHRKLMVNLSPTKDKDFLLHANSKEHSVELQKCENPLPEQAFFVLHEQPSKCVSFECKSHPGVFLGVKNNQLALIKLGEHPEDSNRENTTFKLSNLM

SEQ ID NO: 94 - protein, 125 aa, Sus scrofa
  MISC_FEATURE (1)..(125): This is another amino acid sequence of Pig IL-33 thought to be the probable mature sequence of K7GRC7.
YITFAFEDGSYEIYVEDLRKDQEKDGGGDHRKLMVNLSPTKDKDFLLHANSKEHSVELQKCENPLPEQAFFVLHEQPSKCVSFECKSHPGVFLGVKNNQLALIKLGEHPEDSNRENTTFKLSNLM

SEQ ID NO: 95 - protein, 273 aa, Bos taurus
  MISC_FEATURE (1)..(273): This is the amino acid sequence of Bovine IL-33.
MKPKMKYSTTKISPAKMKCSAGKALVKSPKLRKSQQKAEEVCQIYYMQLRSGLKIEKKVCYFRKETTKRHSLTAEKYKEHLALVACEQLNHLQQSVEQGFTLGKTMVPYTTATGLPSIKEHSASLSTYNDQFITFVLEDGSYEIYVEDLIDNQEKDKVLLRYYDSQFPSSETDDGGSHRKLMVNLSPTKDKDFLLHANSKEHSVELQKCENQLPEQTFFVLHETSSQCVSFECKSNPGVFLGVKDNQLALIKRGEHPEDSNSQNITFKLSNLM

SEQ ID NO: 96 - protein, 142 aa, Bos taurus
  MISC_FEATURE (1)..(142): This is the amino acid sequence of the probable mature sequence of Bovine IL-33.
FITFVLEDGSYEIYVEDLIDNQEKDKVLLRYYDSQFPSSETDDGGSHRKLMVNLSPTKDKDFLLHANSKEHSVELQKCENQLPEQTFFVLHETSSQCVSFECKSNPGVFLGVKDNQLALIKRGEHPEDSNSQNITFKLSNLM

SEQ ID NO: 97 - protein, 270 aa, Homo sapiens
  MISC_FEATURE (1)..(270): This is the amino acid sequence of Human IL-33 - Full length (1-270).
MKPKMKYSTNKISTAKWKNTASKALCFKLGKSQQKAKEVCPMYFMKLRSGLMIKKEACYFRRETTKRPSLKTGRKHKRHLVLAACQQQSTVECFAFGISGVQKYTRALHDSSITGISPITEYLASLSTYNDQSITFALEDESYEIYVEDLKKDEKKDKVLLSYYESQHPSNESGDGVDGKMLMVTLSPTKDFWLHANNKEHSVELHKCEKPLPDQAFFVLHNMHSNCVSFECKTDPGVFIGVKDNHLALIKVDSSENLCTENILFKLSET

SEQ ID NO: 98 - protein, 176 aa, Homo sapiens
  MISC_FEATURE (1)..(176): This is the amino acid sequence of Human IL-33 - Chain 1(95-270).
AFGISGVQKYTRALHDSSITGISPITEYLASLSTYNDQSITFALEDESYEIYVEDLKKDEKKDKVLLSYYESQHPSNESGDGVDGKMLMVTLSPTKDFWLHANNKEHSVELHKCEKPLPDQAFFVLHNMHSNCVSFECKTDPGVFIGVKDNHLALIKVDSSENLCTENILFKLSET

SEQ ID NO: 99 - protein, 172 aa, Homo sapiens
  MISC_FEATURE (1)..(172): This is the amino acid sequence of Human IL-33 - Chain 2(99-270).
SGVQKYTRALHDSSITGISPITEYLASLSTYNDQSITFALEDESYEIYVEDLKKDEKKDKVLLSYYESQHPSNESGDGVDGKMLMVTLSPTKDFWLHANNKEHSVELHKCEKPLPDQAFFVLHNMHSNCVSFECKTDPGVFIGVKDNHLALIKVDSSENLCTENILFKLSET

SEQ ID NO: 100 - protein, 162 aa, Homo sapiens
  MISC_FEATURE (1)..(162): This is the amino acid sequence of Human IL-33 - Chain 3 (109-270).
HDSSITGISPITEYLASLSTYNDQSITFALEDESYEIYVEDLKKDEKKDKVLLSYYESQHPSNESGDGVDGKMLMVTLSPTKDFWLHANNKEHSVELHKCEKPLPDQAFFVLHNMHSNCVSFECKTDPGVFIGVKDNHLALIKVDSSENLCTENILFKLSET

SEQ ID NO: 101 - protein, 157 aa, Canis lupus familiaris
  MISC_FEATURE (1)..(157): This is the amino acid sequence of Canine TNF-alpha protein.
VKSSSRTPSDKPVAHVVANPEAEGQLQWLSRRANALLANGVELTDNQLIVPSDGLYLIYSQVLFKGQGCPSTHVLLTHTISRFAVSYQTKVNLLSAIKSPCQRETPEGTEAKPWYEPIYLGGVFQLEKGDRLSAEINLPNYLDFAESGQVYFGIIAL

SEQ ID NO: 102 - protein, 157 aa, Felis catus
  MISC_FEATURE (1)..(157): This is the amino acid sequence of Feline TNF-alpha protein.
LRSSSRTPSDKPVAHVVANPEAEGQLQWLSRRANALLANGVELTDNQLKVPSDGLYLIYSQVLFTGQGCPSTHVLLTHTISRFAVSYQTKVNLLSAIKSPCQRETPEGAEAKPWYEPIYLGGVFQLEKGDRLSTEINLPAYLDFAESGQVYFGIIAL

SEQ ID NO: 103 - protein, 153 aa, Bos taurus
  MISC_FEATURE (1)..(153): This is the amino acid sequence of Bovine IL1-beta protein.
APVQSIKCKLQDREQKSLVLASPCVLKALHLLSQEMNREVVFCMSFVQGEERDNKIPVALGIKDKNLYLSCVKKGDTPTLQLEEVDPKVYPKRNMEKRFVFYKTEIKNTVEFESVLYPNWYISTSQIEERPVFLGHFRGGQDITDFRMETLSP

SEQ ID NO: 104 - protein, 152 aa, Canis lupus familiaris
  MISC_FEATURE (1)..(152): This is the amino acid sequence of Canine IL1-beta protein.
AAMQSVDCKLQDISHKYLVLSNSYELRALHLNGENVNKQVVFHMSFVHGDESNNKIPVVLGIKQKNLYLSCVMKDGKPTLQLEKVDPKVYPKRKMEKRFVFNKIEIKNTVEFESSQYPNWYISTSQVEGMPVFLGNTRGGQDITDFTMEFSS

SEQ ID NO: 105 - protein, 152 aa, Felis catus
  MISC_FEATURE (1)..(152): This is the amino acid sequence of Feline IL1-beta protein.
AAIQSQDYTFRDISQKSLVLSGSYELRALHLNGQNMNQQVVFRMSFVHGEENSKKIPVVLCIKKNNLYLSCVMKDGKPTLQLEMLDPKVYPKKKMEKRFVFNKTEIKGNVEFESSQFPNWYISTSQAEEMPVFLGNTKGGQDITDFIMESAS

SEQ ID NO: 106 - protein, 135 aa, Canis lupus familiaris
  MISC_FEATURE (1)..(135): This is the amino acid sequence of Dog IL-2 protein.
APITSSSTKETEQQMEQLLLDLQLLLNGVNNYENPQLSRMLTFKFYTPKKATEFTHLQCLAEELKNLEEVLGLPQSKNVHLTDTKELISNMNVTLLKLKGSETSYNCEYDDETATITEFLNKWITFCQSIFSTLT

SEQ ID NO: 107 - protein, 134 aa, Felis catus
  MISC_FEATURE (1)..(134): This is the amino acid sequence of Cat IL-2 protein.
APASSSTKETQQQLEQLLLDLRLLLNGVNNPENPKLSRMLTFKFYVPKKATELTHLQCLVEELKPLEEVLYLAQSKNFHLNHIKELMSNINVTVLKLKGSETRFTCNYDDETATIVEFLNKWITFCQSIFSTLT

SEQ ID NO: 108 - protein, 133 aa, Homo sapiens [sequence omitted]

SEQ ID NO: 109 - protein, 120 aa, Canis lupus familiaris
  MISC_FEATURE (1)..(120): This is the amino acid sequence of Dog IL-3 protein.
RPFSTDLPKQYFTMINEIMEMLNKSPSPSEEPLDSNEKETLLEDTLLRPNLDVFLNASSKFHKNGLLIWNNLKEFLPLLPTPTPRGEPISIMENNWGDFQRKLKKYLEALDNFLNFKNKP

SEQ ID NO: 110 - protein, 133 aa, Homo sapiens
  MISC_FEATURE (1)..(133): This is the amino acid sequence of Human IL-3 protein.
APMTQTTPLKTSWVNCSNMIDEIITHLKQPPLPLLDFNNLNGEDQDILMENNLRRPNLEAFNRAVKSLQNASAIESILKNLLPCLPLATAAPTRHPIHIKDGDWNEFRRKLTFYLKTLENAQAQQTTLSLAIF

SEQ ID NO: 111 - protein, 187 aa, Canis lupus familiaris
  MISC_FEATURE (1)..(187): This is the amino acid sequence of Dog IL-6 protein.
FPTPGPLAGDSKDDATSNSLPLTSANKVEELIKYILGKISALRKEMCDKFNKCEDSKEALAENNLHLPKLEGKDGCFQSGFNQETCLTRITTGLVEFQLHLNILQNNYEGDKENVKSVHMSTKILVQMLKSKVKNQDEVTTPDPTTDASLQAILQSQDECVKHTTIHLILRSLEDFLQFSLRAVRIM

SEQ ID NO: 112 - protein, 181 aa, Felis catus
  MISC_FEATURE (1)..(181): This is the amino acid sequence of Cat IL-6 protein.
TPGPLGGDATSNRLPLTSADKMEELIKYILGKISALKKEMCDNYNKCEDSKEALAENNLNLPKLAEKDGCFQSGFNQETCLTRITTGLQEFQIYLKFLQDKYEGDEENAKSVYTSTNVLLQMLKRKGKNQDEVTIPVPTVEVGLQAKLQSQEEWLRHTTIHLTLRRLEDFLQFSLRAVRIM

SEQ ID NO: 113 - protein, 179 aa, Bos taurus
  MISC_FEATURE (1)..(179): This is the amino acid sequence of Bovine IL-6 protein.
GPLGEDFKNDTTPGRLLLTTPEKTEALIKRMVDKISAMRKEICEKNDECESSKETLAENKLNLPKMEEKDGCFQSGFNQAICLIRTTAGLLEYQIYLDYLQNEYEGNQENVRDLRKNIRTLIQILKQKIADLITTPATNTDLLEKMQSSNEWVKNAKIILILRNLENFLQFSLRAIRMK

SEQ ID NO: 114 - protein, 183 aa, Homo sapiens
  MISC_FEATURE (1)..(183): This is the amino acid sequence of Human IL-6 protein.
VPPGEDSKDVAAPHRQPLTSSERIDKQIRYILDGISALRKETCNKSNMCESSKEALAENNLNLPKMAEKDGCFQSGFNEETCLVKIITGLLEFEVYLEYLQNRFESSEEQARAVQMSTKVLIQFLQKKAKNLDAITTPDPTTNASLLTKLQAQNQWLQDMTTHLILRSFKEFLQSSLRALRQM

SEQ ID NO: 115 - protein, 152 aa, Homo sapiens
  MISC_FEATURE (1)..(152): This is the amino acid sequence of Human IL-7 protein.
DCDIEGKDGKQYESVLMVSIDQLLDSMKEIGSNCLNNEFNFFKRHICDANKEGMFLFRAARKLRQFLKMNSTGDFDLHLLKVSEGTTILLNCTGQVKGRKPAALGEAQPTKSLEENKSLKEQKKLNDLCFLKRLLQEIKTCWNKILMGTKEH

SEQ ID NO: 116 - protein, 79 aa, Canis lupus familiaris
  MISC_FEATURE (1)..(79): This is the amino acid sequence of Dog IL-8 protein.
AVLSRVSSELRCQCIKTHSTPFHPKYIKELRVIDSGPHCENSEIIVKLFNGNEVCLDPKEKWVQKVVQIFLKKAEKQDP

SEQ ID NO: 117 - protein, 79 aa, Felis catus
  MISC_FEATURE (1)..(79): This is the amino acid sequence of Cat IL-8 protein.
AVLSRISSELRCQCIKTHSTPFNPKLIKELTVIDSGPHCENSEIIVKLVNGKEVCLDPKQKWVQKVVEIFLKKAEKQNA

SEQ ID NO: 118 - protein, 79 aa, Bos taurus
  MISC_FEATURE (1)..(79): This is the amino acid sequence of Bovine IL-8 protein.
AVLSRMSTELRCQCIKTHSTPFHPKFIKELRVIESGPHCENSEIIVKLTNGNEVCLNPKEKWVQKVVQVFVKRAEKQDP

SEQ ID NO: 119 - protein, 79 aa, Homo sapiens
  MISC_FEATURE (1)..(79): This is the amino acid sequence of Human IL-8 - aa 21-99 protein.
EGAVLPRSAKELRCQCIKTYSKPFHPKFIKELRVIESGPHCANTEIIVKLSDGRELCLDPKENWVQRVVEKFLKRAENS

SEQ ID NO: 120 - protein, 77 aa, Homo sapiens
  MISC_FEATURE (1)..(77): This is the amino acid sequence of Human IL-8 - aa 23-99 protein.
AVLPRSAKELRCQCIKTYSKPFHPKFIKELRVIESGPHCANTEIIVKLSDGRELCLDPKENWVQRVVEKFLKRAENS

SEQ ID NO: 121 - protein, 73 aa, Homo sapiens
  MISC_FEATURE (1)..(73): This is the amino acid sequence of Human IL-8 - aa 27-99 protein.
RSAKELRCQCIKTYSKPFHPKFIKELRVIESGPHCANTEIIVKLSDGRELCLDPKENWVQRVVEKFLKRAENS

SEQ ID NO: 122 - protein, 72 aa, Homo sapiens
  MISC_FEATURE (1)..(72): This is the amino acid sequence of Human IL-8 - aa 28-99 protein.
SAKELRCQCIKTYSKPFHPKFIKELRVIESGPHCANTEIIVKLSDGRELCLDPKENWVQRVVEKFLKRAENS

SEQ ID NO: 123 - protein, 71 aa, Homo sapiens
  MISC_FEATURE (1)..(71): This is the amino acid sequence of Human IL-8 - aa 29-99 protein.
AKELRCQCIKTYSKPFHPKFIKELRVIESGPHCANTEIIVKLSDGRELCLDPKENWVQRVVEKFLKRAENS

SEQ ID NO: 124 - protein, 70 aa, Homo sapiens [sequence omitted]

SEQ ID NO: 125 - protein, 69 aa, Homo sapiens
  MISC_FEATURE (1)..(69): This is the amino acid sequence of Human IL-8 - aa 31-99 protein.
ELRCQCIKTYSKPFHPKFIKELRVIESGPHCANTEIIVKLSDGRELCLDPKENWVQRVVEKFLKRAENS

SEQ ID NO: 126 - protein, 126 aa, Homo sapiens
  MISC_FEATURE (1)..(126): This is the amino acid sequence of Human IL-9 protein.
QGCPTLAGILDINFLINKMQEDPASKCHCSANVTSCLCLGIPSDNCTRPCFSERLSQMTNTTMQTRYPLIFSRVKKSVEVLKNNKCPYFSCEQPCNQTTAGNALTFLKSLLEIFQKEKMRGMRGKI

SEQ ID NO: 127 - protein, 162 aa, Canis lupus familiaris
  MISC_FEATURE (1)..(162): This is the amino acid sequence of Dog IL-10 protein.
SRHQSTLLEDDCTHFPASLPHMLRELRAAFGRVKIFFQMKDKLDNILLTGSLLEDFKSYLGCQALSEMIQFYLEEVMPRAENHDPDIKNHVNSLGEKLKTLRLRLRLRRCHRFLPCENKSKAVEQVKSAFSKLQEKGVYKAMSEFDIFINYIETYMTMRMKI

SEQ ID NO: 128 - protein, 160 aa, Felis catus
  MISC_FEATURE (1)..(160): This is the amino acid sequence of Cat IL-10 protein.
SRHQSTLSEDNCTHFSVSLPHMLRELRAAFGKVKTFFQTKDELHSILLTRSLLEDFKGYLGCQALSEMIQFYLEEVMPQAENEDPDIKQHVNSLGEKLKTLRLRLRRCHRFLPCENKSKVVEQVKSTFSKLQEKGVYKAMGEFDIFINYIEAYMTMKMKI

SEQ ID NO: 129 - protein, 160 aa, Homo sapiens
  MISC_FEATURE (1)..(160): This is the amino acid sequence of Human IL-10 protein.
SPGQGTQSENSCTHFPGNLPNMLRDLRDAFSRVKTFFQMKDQLDNLLLKESLLEDFKGYLGCQALSEMIQFYLEEVMPQAENQDPDIKAHVNSLGENLKTLRLRLRRCHRFLPCENKSKAVEQVKNAFNKLQEKGIYKAMSEFDIFINYIEAYMTMKIRN

SEQ ID NO: 130 - protein, 178 aa, Homo sapiens
  MISC_FEATURE (1)..(178): This is the amino acid sequence of Human IL-11 protein.
PGPPPGPPRVSPDPRAELDSTVLLTRSLLADTRQLAAQLRDKFPADGDHNLDSLPTLAMSAGALGALQLPGVLTRLRADLLSYLRHVQWLRRAGGSSLKTLEPELGTLQARLDRLLRRLQLLMSRLALPQPPPDPPAPPLAPPSSAWGGIRAAHAILGGLHLTLDWAVRGLLLLKTRL

SEQ ID NO: 131 - protein, 546 aa, Homo sapiens
  MISC_FEATURE (1)..(546): This is the amino acid sequence of Human IL-14 protein.
MKNQDKKNGAAKQSNPKSSPGQPEAGPEGAQERPSQAAPAVEAEGPGSSQAPRKPEGAQARTAQSGALRDVSEELSRQLEDILSTYCVDNNQGGPGEDGAQGEPAEPEDAEKSRTYVARNGEPEPTPVVNGEKEPSKGDPNTEEIRQSDEVGDRDHRRPQEKKKAKGLGKEITLLMQTLNTLSTPEEKLAALCKKYAELLEEHRNSQKQMKLLQKKQSQLVQEKDHLRGEHSKAVLARSKLESLCRELQRHNRSLKEEGVQRAREEEEKRKEVTSHFQVTLNDIQLQMEQHNERNSKLRQENMELAERLKKLIEQYELREEHIDKVFKHKDLQQQLVDAKLQQAQEMLKEAEERHQREKDFLLKEAVESQRMCELMKQQETHLKQQLALYTEKFEEFQNTLSKSSEVFTTFKQEMEKMTKKIKKLEKETTMYRSRWESSNKALLEMAEEKTVRDKELEGLQVKIQRLEKLCRALQTERNDLNKRVQDLSAGGQGSLTDSGPERRPEGPGAQAPSSPRVTEAPCYPGAPSTEASGQTGPQEPTSARA

SEQ ID NO: 132 - protein, 114 aa, Felis catus
  MISC_FEATURE (1)..(114): This is the amino acid sequence of Cat IL-15 protein.
NWQDVISDLKIIDKIIQSLHIDATLYTESDVHPNCKVTAMKCFLLELHVISLESKNETIHQTVENIIILANSGLSSNRNITETGCKECEELEEKNIKEFLQSFVHIVQMFINTS

SEQ ID NO: 133 - protein, 114 aa, Homo sapiens
  MISC_FEATURE (1)..(114): This is the amino acid sequence of Human IL-15 protein.
NWVNVISDLKKIEDLIQSMHIDATLYTESDVHPSCKVTAMKCFLLELQVISLESGDASIHDTVENLIILANNSLSSNGNVTESGCKECEELEEKNIKEFLQSFVHIVQMFINTS

SEQ ID NO: 134 - protein, 1332 aa, Homo sapiens
  MISC_FEATURE (1)..(1332): This is the amino acid sequence of Human IL-16 - 1-1332 aa protein.
MESHSRAGKSRKSAKFRSISRSLMLCNAKTSDDGSSPDEKYPDPFEISLAQGKEGIFHSSVQLADTSEAGPSSVPDLALASEAAQLQAAGNDRGKTCRRIFFMKESSTASSREKPGKLEAQSSNFLFPKACHQRARSNSTSVNPYCTREIDFPMTKKSAAPTDRQPYSLCSNRKSLSQQLDCPAGKAAGTSRPTRSLSTAQLVQPSGGLQASVISNIVLMKGQAKGLGFSIVGGKDSIYGPIGIYVKTIFAGGAAAADGRLQEGDEILELNGESMAGLTHQDALQKFKQAKKGLLTLTVRTRLTAPPSLCSHLSPPLCRSLSSSTCITKDSSSFALESPSAPISTAKPNYRIMVEVSLQKEAGVGLGIGLCSVPYFQCISGIFVHTLSPGSVAHLDGRLRCGDEIVEISDSPVHCLTLNEVYTILSHCDPGPVPIIVSRHPDPQVSEQQLKEAVAQAVENTKFGKERHQWSLEGVKRLESSWHGRPTLEKEREKNSAPPHRRAQKVMIRSSSDSSYMSGSPGGSPGSGSAEKPSSDVDISTHSPSLPLAREPVVLSIASSRLPQESPPLPESRDSHPPLRLKKSFEILVRKPMSSKPKPPPRKYFKSDSDPQKSLEERENSSCSSGHTPPTCGQEARELLPLLLPQEDTAGRSPSASAGCPGPGIGPQTKSSTEGEPGWRRASPVTQTSPIKHPLLKRQARMDYSFDTTAEDPWVRISDCIKNLFSPIMSENHGHMPLQPNASLNEEEGTQGHPDGTPPKLDTANGTPKVYKSADSSTVKKGPPVAPKPAWFRQSLKGLRNRASDPRGLPDPALSTQPAPASREHLGSHIRASSSSSSIRQRISSFETFGSSQLPDKGAQRLSLQPSSGEAAKPLGKHEEGRFSGLLGRGAAPTLVPQQPEQVLSSGSPAASEARDPGVSESPPPGRQPNQKTLPPGPDPLLRLLSTQAEESQGPVLKMPSQRARSFPLTRSQSCETKLLDEKTSKLYSISSQVSSAVMKSLLCLPSSISCAQTPCIPKEGASPTSSSNEDSAANGSAETSALDTGFSLNLSELREYTEGLTEAKEDDDGDHSSLQSGQSVISLLSSEELKKLIEEVKVLDEATLKQLDGIHVTILHKEEGAGLGFSLAGGADLENKVITVHRVFPNGLASQEGTIQKGNEVLSINGKSLKGTTHHDALAILRQAREPRQAVIVTRKLTPEAMPDLNSSTDSAASASAASDVSVESTAEATVCTVTLEKMSAGLGFSLEGGKGSLHGDKPLTINRIFKGAASEQSETVQPGDEILQLGGTAMQGLTRFEAWNIIKALPDGPVTIVIRRKSLQSKETTAAGDS

SEQ ID NO: 135 - protein, 121 aa, Homo sapiens
  MISC_FEATURE (1)..(121): This is the amino acid sequence of Human IL-16 - 1212-1332 aa protein.
SAASASAASDVSVESTAEATVCTVTLEKMSAGLGFSLEGGKGSLHGDKPLTINRIFKGAASEQSETVQPGDEILQLGGTAMQGLTRFEAWNIIKALPDGPVTIVIRRKSLQSKETTAAGDS

SEQ ID NO: 136 - protein, 127 aa, Canis lupus familiaris
  MISC_FEATURE (1)..(127): This is the amino acid sequence of Dog IL-17A protein.
FPQNPGCRNTEDKNFPQHVKVNLNILNRNTNSRRPSDYYNRSTSPWNLHRNEDPERYPSVIWEAKCRHLGCVNNEGNINYHMNSVPIQQEILVLRRESQHCPHSFRLEKMLVAVGCTCVTPIVRHVA

SEQ ID NO: 137 - protein, 127 aa, Felis catus
  MISC_FEATURE (1)..(127): This is the amino acid sequence of Cat IL-17A protein.
FPQNPGCPTTEDKNFPQHVKVNVNILNGNKSSRRPLDYYRRSTSPWSLHRNEDPERYPSVIWEAKCLHWGCVNTEGKEDHHMNSVPIQQEILVLRRESRHCPHSFRLEKMLVTVGCTCVTPIVRHVV

SEQ ID NO: 138 - protein, 158 aa, Canis lupus familiaris
  MISC_FEATURE (1)..(158): This is the amino acid sequence of Dog IL-17B protein.
RNPKGKRKGPGRPGTLAPGPHQVPLDLVSQAKPYARMEEYERNLSEMVAQLRNSSEPARRKCEVNLQLWLSNKRSLSPWGYSINHDPSRVPADLPEARCLCLGCVNPFTMQEDRSMVSVPVFSQVPVRRRLCPLPPRTGPCRQRAVMETIAVGCTCIF

SEQ ID NO: 139 - protein, 158 aa, Felis catus
  MISC_FEATURE (1)..(158): This is the amino acid sequence of Cat IL-17B protein.
RNPKGKRKGPGRPGTLASGPHQVPLDLVSQAKPYARMEEYERNLGEMVAQLRNSSEPARRKCEVNLQLWLSNKRSLSPWGYSINHDPSRIPADLPEARCLCLGCVNPFTMQEDRSMVSVPVFSQVPVRRRLCPLPPRTGPCRQRAVMETIAVGCTCIF

SEQ ID NO: 140 - protein, 160 aa, Homo sapiens
  MISC_FEATURE (1)..(160): This is the amino acid sequence of Human IL-17B protein.
QPRSPKSKRKGQGRPGPLAPGPHQVPLDLVSRMKPYARMEEYERNIEEMVAQLRNSSELAQRKCEVNLQLWMSNKRSLSPWGYSINHDPSRIPVDLPEARCLCLGCVNPFTMQEDRSMVSVPVFSQVPVRRRLCPPPPRTGPCRQRAVMETIAVGCTCIF

SEQ ID NO: 141 - protein, 179 aa, Canis lupus familiaris
  MISC_FEATURE (1)..(179): This is the amino acid sequence of Dog IL-17C protein.
RHGPQLWRGLHTHGTPRCYSAEELPRGQAPPHLLARAAKWEQALPVALVSSLEAGGRGREQDGPPAGAQCPVLQPEEVLEADIHQRSISPWRYRVDTDESRYPQKLAFAECLCRGCISARTGRETAALNSVPLLQSLLVLRRRPCSRDTTGLPTPGAFSFHAEFIRVPIGCTCVLPRST

SEQ ID NO: 142 - protein, 180 aa, Felis catus
  MISC_FEATURE (1)..(180): This is the amino acid sequence of Cat IL-17C protein.
RHGPQLWGGPHAHGTPRCYSAEELPLGQPPPHLLARAAKWEQALPVALVSSLEAGGRRRRHDGPPAGTQCPVLRPEDVLEAGIHQRSISPWRYRVDTDESRYPQKLAFAQCLCRGCVSARTGRETAALNSVPLLQSLLVLRRQPCSREATGLPTPGAFSFHAEFIRVPVGCTCVLPRSAR

SEQ ID NO: 143 - protein, 179 aa, Homo sapiens
  MISC_FEATURE (1)..(179): This is the amino acid sequence of Human IL-17C protein.
HHDPSLRGHPHSHGTPHCYSAEELPLGQAPPHLLARGAKWGQALPVALVSSLEAASHRGRHERPSATTQCPVLRPEEVLEADTHQRSISPWRYRVDTDEDRYPQKLAFAECLCRGCIDARTGRETAALNSVRLLQSLLVLRRRPCSRDGSGLPTPGAFAFHTEFIHVPVGCTCVLPRSV

SEQ ID NO: 144 - protein, 185 aa, Felis catus
  MISC_FEATURE (1)..(185): This is the amino acid sequence of Cat IL-17D protein.
ALRASRRPARPRGCAERPEELLEQLYGRLAAGVLGAFHHTLQLGPREQARNASCPAGGRPGDRRFRPPTNLRSVSPWAYRISYDPARYPKYLPEAYCLCRGCLTGLFGEEDLRFRSAPVYMPTVILRRTSACAGGRWVYTEEYVTVPVGCTCVPEQEKEADAVNSSMDKQGARLLLGPGDKPGRP

SEQ ID NO: 145 - protein, 187 aa, Homo sapiens
  MISC_FEATURE (1)..(187): This is the amino acid sequence of Human IL-17D protein.
AGAPRAGRRPARPRGCADRPEELLEQLYGRLAAGVLSAFHHTLQLGPREQARNASCPAGGRPADRRFRPPTNLRSVSPWAYRISYDPARYPRYLPEAYCLCRGCLTGLFGEEDVRFRSAPVYMPTVVLRRTPACAGGRSVYTEAYVTIPVGCTCVPEPEKDADSINSSIDKQGAKLLLGPNDAPAGP

SEQ ID NO: 146 - protein, 129 aa, Canis lupus familiaris
  MISC_FEATURE (1)..(129): This is the amino acid sequence of Dog IL-17F protein.
RKHLKAGETALCPPLEDNSVRVDIRILRQNRGISISNDFQNRSSSPWDYNITRDPHRFPSEIAEAQCRHSGCINAEGQEDSSMNSVPIQQEFLVLRREPQGCSRSFRLEKVLVTVGCTCVTPIVRYVRA

SEQ ID NO: 147 - protein, 130 aa, Felis catus
  MISC_FEATURE (1)..(130): This is the amino acid sequence of Cat IL-17F protein.
RKNPKAGDTALCPPLEDNSVRVDIRILRQNQGGISISNDFQNRSSSPWDYNVTRDPNRFPSEIVEAQCRHSGCINAEGQEDSSMNSVPIQQEFLVLRREPQGCSRTFRLEKVRVTVGCTCVTPIVRYVRA

SEQ ID NO: 148 - protein, 133 aa, Homo sapiens [sequence omitted]

SEQ ID NO: 149 - protein, 157 aa, Canis lupus familiaris
  MISC_FEATURE (1)..(157): This is the amino acid sequence of Dog IL-18 protein.
YFGKLEPKLSIIRNLNDQVLFVNEGNQPVFEDMPDSDCTDNAPHTIFIIYMYKDSLTRGLAVTISVKYKTMSTLSCKNKTISFQKMSPPDSINDEGNDIIFFQRSVPGHDDKIQFESSLYKGHFLACKKENDLFKLILKDKDENGDKSIMFTVQNKS

SEQ ID NO: 150 - protein, 157 aa, Felis catus
  MISC_FEATURE (1)..(157): This is the amino acid sequence of Cat IL-18 protein.
YFGKLEHKLSILRNLNDQVLFINQGDQPVFEDMPDSDCTDNAPRTEFIIYMYKDSLTRGLAVTISVNYKTMSTLSCENKIISFKEMSPPESINDEGNDIIFFQRSVPGHDDKIQFESSLYKGYFLACEKEKDLFKLILKKKDENGDKSIMFTVQNKN

SEQ ID NO: 151 - protein, 157 aa, Homo sapiens
  MISC_FEATURE (1)..(157): This is the amino acid sequence of Human IL-18 protein.
YFGKLESKLSVIRNLNDQVLFIDQGNRPLFEDMTDSDCRDNAPRTIFIISMYKDSQPRGMAVTISVKCEKISTLSCENKIISFKEMNPPDNIKDTKSDIIFFQRSVPGHDNKMQFESSSYEGYFLACEKERDLFKLILKKEDELGDRSIMFTVQNED

SEQ ID NO: 152 - protein, 153 aa, Homo sapiens
  MISC_FEATURE (1)..(153): This is the amino acid sequence of Human IL-19 protein.
LRRCLISTDMHHIEESFQEIKRAIQAKDTFPNVTILSTLETLQIIKPLDVCCVTKNLLAFYVDRVFKDHQEPNPKILRKISSIANSFLYMQKTLRQCQEQRQCHCRQEATNATRVIHDNYDQLEVHAAAIKSLGELDVFLAWINKNHEVMFSA

SEQ ID NO: 153 - protein, 152 aa, Homo sapiens
  MISC_FEATURE (1)..(152): This is the amino acid sequence of Human IL-20 protein.
LKTLNLGSCVIATNLQEIRNGFSEIRGSVQAKDGNIDIRILRRTESLQDTKPANRCCLLRHLLRLYLDRVFKNYQTPDHYTLRKISSLANSFLTIKKDLRLCHAHMTCHCGEEAMKKYSQILSHFEKLEPQAAVVKALGELDILLQWMEETE

SEQ ID NO: 154 - protein, 129 aa, Canis lupus familiaris
  MISC_FEATURE (1)..(129): This is the amino acid sequence of Dog IL-21 protein.
HKSSFQEQDLLLIRMRQLIDIVDQLKNYVNDLDPESLPAPEDVKRHCERSAFSCFQKVQLKAANTGGNEQIINVLTKQLKRKLPPTNAGRRQKHRPACPSCDSYEKAPPKEFLERLKSLIQKMIHQHLS

SEQ ID NO: 155 - protein, 138 aa, Homo sapiens
  MISC_FEATURE (1)..(138): This is the amino acid sequence of Human IL-21 protein.
HKSSSQGQDRHMIRMRQLIDIVDQLKNYVNDLVPEFLPAPEDVETNCEWSAFSCFQKAQLKSANTGNNERIINVSIKKLKRKPPSTNAGRRQKHRLTCPSCDSYEKKPPKEFLERFKSLLQKMIHQHLSSRTHGSEDS

SEQ ID NO: 156 - protein, 146 aa, Canis lupus familiaris
  MISC_FEATURE (1)..(146): This is the amino acid sequence of Dog IL-22 protein.
LPISSHCRLDKSNFQQPYITNRTFMLAKEASLADNNTDVRLIGEKLFHGVNMGERCYLMKEVLNFTLEEVLLPQSDRFQPYMQEVVPFLARLSNKLSQCHIENDDQHIQRNVQKLKDTVQKLGENGEIKAIGELDLLFMALRNACV

SEQ ID NO: 157 - protein, 146 aa, Felis catus
  MISC_FEATURE (1)..(146): This is the amino acid sequence of Cat IL-22 protein.
VPISSHCRLDGSNFQQPYITNRTFMLAKEASLADNNTDVRLIGEKLFYEVNMGERCYLMKQVLNFTLEEVLLPQSDRFQPYMQEVVPFLARLSNKLSQCHIDSDDQHIQRNVQNLKDTVKKLGENGEIKVIGELDLLFMALRNACN

SEQ ID NO: 158 - protein, 146 aa, Homo sapiens
  MISC_FEATURE (1)..(146): This is the amino acid sequence of Human IL-22 protein.
APISSHCRLDKSNFQQPYITNRTFMLAKEASLADNNTDVRLIGEKLFHGVSMSERCYLMKQVLNFTLEEVLFPQSDRFQPYMQEVVPFLARLSNRLSTCHIEGDDLHIQRNVQKLKDTVKKLGESGEIKAIGELDLLFMSLRNACI

SEQ ID NO: 159 - protein, 102 aa, Canis lupus familiaris
  MISC_FEATURE (1)..(102): This is the amino acid sequence of Dog IL-24 protein.
QEFRFGPCRVQGVALRELREAFWTVKDTVQAKDNITSVRLLRKEVLQDVSQEDEMFSISESARRRFLLFQRAFKQLDIQAAQTKAFGEVDILLTWMEKFYEF

SEQ ID NO: 160 - protein, 155 aa, Canis lupus familiaris
  MISC_FEATURE (1)..(155): This is the amino acid sequence of Dog IL-24 Family Protein.
QEFRFGPCRVQGVALRELREAFWTVKDTVQAKDNITSVRLLRKEVLQDVSDAESCYLIRALLKFYLNTVFKNYLDEAADVRIRRSFSTLANNFFVIASKLQPSQEDEMFSISESARRRFLLFQRAFKQLDIQAAQTKAFGEVDILLTWMEKFYEF

SEQ ID NO: 161 - protein, 102 aa, Felis catus
  MISC_FEATURE (1)..(102): This is the amino acid sequence of Cat IL-24 protein.
QEFQFGPCRVEGVVLQELWEAFWAMKDIVQAKDNITNVRLLRKEVLQNVSQENEMFSVSDSARRRFLLFQRAFKQLDIEAAQTKAFGEVDILLTWMEKFYQL

SEQ ID NO: 162 - protein, 155 aa, Felis catus
  MISC_FEATURE (1)..(155): This is the amino acid sequence of Cat IL-24 Family Protein.
QEFQFGPCRVEGVVLQELWEAFWAMKDIVQAKDNITNVRLLRKEVLQNVSNAESCYLIRALLKFYLNTVFKNYQDKAADFRVRKSFSTLANNFVVIVSKLQPSQENEMFSVSDSARRRFLLFQRAFKQLDIEAAQTKAFGEVDILLTWMEKFYQL

SEQ ID NO: 163 - protein, 155 aa, Homo sapiens
  MISC_FEATURE (1)..(155): This is the amino acid sequence of Human IL-24 protein.
QEFHFGPCQVKGVVPQKLWEAFWAVKDTMQAQDNITSARLLQQEVLQNVSDAESCYLVHTLLEFYLKTVFKNYHNRTVEVRTLKSFSTLANNFVLIVSQLQPSQENEMFSIRDSAHRRFLLFRRAFKQLDVEAALTKALGEVDILLTWMQKFYKL

SEQ ID NO: 164 - protein, 145 aa, Canis lupus familiaris
  MISC_FEATURE (1)..(145): This is the amino acid sequence of Dog IL-25 protein.
CTHWPNCCPSKRQDPTHEWLKRDTVLKFPGETTSLTHHPESCKASEDGPLNSRSISPWKYELDRDLNRLPQDLYHARCLCQHCVSLQTGSHMDPLGNSELLYHNQTVFYRRPCPGEQGAPDGYCLEQRLYRVSLACVCVRPRVMA

SEQ ID NO: 165 - protein, 145 aa, Felis catus
  MISC_FEATURE (1)..(145): This is the amino acid sequence of Cat IL-25 protein.
LSHWSSCCPSKGQNPTHEWLTENTVLMTPPESASLIHSLESCRASEDGPLNSRSISPWRYELDRDLNRLPQDLYHARCLCPHCVSLQTGSHMDPLGNSELLYHNQTVFYRRPCPGEQGTRDGYCLEQRLYRVSLACVCVRPRVMA

SEQ ID NO: 166 - protein, 145 aa, Homo sapiens
  MISC_FEATURE (1)..(145): This is the amino acid sequence of Human IL-25 protein.
YSHWPSCCPSKGQDTSEELLRWSTVPVPPLEPARPNRHPESCRASEDGPLNSRAISPWRYELDRDLNRLPQDLYHARCLCPHCVSLQTGSHMDPRGNSELLYHNQTVFYRRPCHGEKGTHKGYCLERRLYRVSLACVCVRPRVMG

SEQ ID NO: 167 - protein, 150 aa, Canis lupus familiaris
  MISC_FEATURE (1)..(150): This is the amino acid sequence of Dog IL-26 family protein.
KHKQSSSAKGCYPRGTLSQAVDTLYVKAAWLKATIPEDRIKNIRLLRKKTKNLFMKNCRFQEQLLSFFMEDVFGQLQLKICREIRFVEELHSLRQQLSRCISCASSAREMKTITRMKSTFYGLGNKGIYKAISELNILLSWIKQFLESIK

SEQ ID NO: 168 - protein, 127 aa, Felis catus
  MISC_FEATURE (1)..(127): This is the amino acid sequence of Cat IL-26 protein.
KHKQSSSAKGCYPRGTLSQAVDRLYVKAAWLKATIPEDRIKNIRLLKKKTKKLFMKNCRFQEQLLSFFMDDVFGQLQLQVCKERHFVEEFHSLRQQLSRCVLSWVRKTSLIKSPVSGACTLLTGREM

SEQ ID NO: 169 - protein, 150 aa, Felis catus
  MISC_FEATURE (1)..(150): This is the amino acid sequence of Cat IL-26 family protein.
KHKQSSSAKGCYPRGTLSQAVDRLYVKAAWLKATIPEDRIKNIRLLKKKTKKLFMKNCRFQEQLLSFFMDDVFGQLQLQVCKERHFVEEFHSLRQQLSRCISCASSAREMKTITRMKRTFYGIGNKGIYKAVSELDILLSWIKQFLESIK

SEQ ID NO: 170 - protein, 150 aa, Homo sapiens
  MISC_FEATURE (1)..(150): This is the amino acid sequence of Human IL-26 protein.
KHKQSSFTKSCYPRGTLSQAVDALYIKAAWLKATIPEDRIKNIRLLKKKTKKQFMKNCQFQEQLLSFFMEDVFGQLQLQGCKKIRFVEDFHSLRQKLSHCISCASSAREMKSITRMKRIFYRIGNKGIYKAISELDILLSWIKKLLESSQ

SEQ ID NO: 171 - protein, 204 aa, Canis lupus familiaris
  MISC_FEATURE (1)..(204): This is the amino acid sequence of Dog IL-27 protein.
FPRPPGRSPLSLQELRREFKVSLQLAKKLFSEVRIQAHHFAESQLPGVSLDLLPLGDQLPNVSLPFQAWHSLSDPERLCFLSMMLHPFHALLESLGSQGGWTSSEKMHLWTMRLDLRDLQRHLRFQVEYPPTCSTPRDQHTKLKLIGSLLKTSPAQRLGKFGGRCSRSSVCVCVCVCVCVCVCPRPRLCSLNLCLPMESWSEQL

SEQ ID NO: 172 - protein, 208 aa, Felis catus
  MISC_FEATURE (1)..(208): This is the amino acid sequence of Cat IL-27 protein.
FPRPPGRPPLSLQELRREFKVSLHLARKLFSEVRTQAHRFAESHLPGVSLDLLPLGDRLPNVSLTFQAWHSLSDPERLCFLFMTLRPFHALLGSLGSQGGWTSSEKIDLWTMRLDLRDLQRHLHFQVLAAGLNLPEEEDDEERKEPLPGAPSGLSRVSGQPSWPQLLYTYQLLHSLELVLARAVRDLLLLSQAGNPAPASGSSFGSWP

SEQ ID NO: 173 - protein, 171 aa, Canis lupus familiaris
  MISC_FEATURE (1)..(171): This is the amino acid sequence of Dog IL-29 protein.
GPVPTSKPTTTRRGCHMDRFQSLSPRELEAFKKTKDALEESLSWKNWSCSSRLFPRSRDLRLLQAWERPVALEAELDLTLKVLENMTDSSLGVTLDQPLRTLHHIHSELQACVPAQPTADPRPHGRLHHWLHRLQKAPKESQGCLEASITFNLFRLLTRDLKCVASRDLCV

SEQ ID NO: 174 - protein, 170 aa, Canis lupus familiaris
  MISC_FEATURE (1)..(170): This is the amino acid sequence of Dog IL-29 protein.
GPVPTSKPTMAWRGCDIGRFKSLSPRELEAFKKAKDALEYSLKNWSCNSRLFPRNRDLRQLQVWERPVALEAELALTLKVLETMADRSLGDILDQPLHTLRHIHSQLQACVSAQPPAGPQPRGRLHPWLHRLHEASKKESQGCLEASVLFNLFRLLKKDLECVAVGDLCV

SEQ ID NO: 175 - protein, 171 aa, Felis catus
  MISC_FEATURE (1)..(171): This is the amino acid sequence of Cat IL-29 protein.
GPVPTSRPPPTRRGCHVGKFPSLSPRELEAFKKARDALEESLPLKNWSCGSRLFPRTRDLIRLQAWERPAALEAELDLTLKVLGNMTDSSLGVVLDQPLRVVRHIHSELQACVRAQPTAGPRPRGRLHHWLHRLQRPPEESQGCLEASVTFNLFRLLTRDLKCVTGGDLCV

SEQ ID NO: 176 - protein, 171 aa, Felis catus
  MISC_FEATURE (1)..(171): This is the amino acid sequence of Cat IL-29, IFN-lambda1 protein.
GPVPTSRPPPTRRGCHVGKFPSLSPRELEAFKKARDALEESLPLKNWSCGSRLFPRTRDLIRLQAWERPAALEAELDLTLKVLGNMTDSSLGVVLDQPLRVLRHIHSELQACVRAQPTAGPRPRGRLHHWLHRLQRAPEESQGCLEASVTFNLFRLLTRDLKCVTGGDLCV

SEQ ID NO: 177 - protein, 181 aa, Homo sapiens
  MISC_FEATURE (1)..(181): This is the amino acid sequence of Human IL-29, IFN-lambda1 protein.
GPVPTSKPTTTGKGCHIGRFKSLSPQELASFKKARDALEESLKLKNWSCSSPVFPGNWDLRLLQVRERPVALEAELALTLKVLEAAAGPALEDVLDQPLHTLHHILSQLQACIQPQPTAGPRPRGRLHHWLHRLQEAPKKESAGCLEASVTFNLFRLLTRDLKYVADGNLCLRTSTHPEST

SEQ ID NO: 178 - protein, 160 aa, Felis catus
  MISC_FEATURE (1)..(160): This is the amino acid sequence of Cat IL-32 protein.
MRHQMHQLVDIFCDRTQHQSRGAPQQRLRLGEVEDGFNEIMLEAVDLHHHQNDDEESSPLLPEVRQELRSRVLRSSVLDLEEKEHPVVQKTEESFCDRALRLFRRLLYQLQLKWQAALAWLREKVAAGFQAFCDAVEAICSAFNSFCTSVAQVFRSAVQA

SEQ ID NO: 179 - protein, 214 aa, Bos taurus
  MISC_FEATURE (1)..(214): This is the amino acid sequence of Bovine IL-34 protein.
NEGLEPWPLTRSDECAITGFLRDKLQYRNRLQYMKHYFPINYRVSVPYEGVLRTANVTRLQRAQVSQQELRYLWVLVSLSATEWVQEVLLEGHPSWKYLEEVHTLLLDVKQGLGGVEVSPQVEAVLNLLSAPGSLKLVRPKALLDNCFRVMQLLYCPCCKESSVLNWQDCEAPQPQPRSPASAQCEAAQLYPLPQPPSTSLPRVLGPSAGPPTQ

SEQ ID NO: 180 - protein, 153 aa, Homo sapiens
  MISC_FEATURE (1)..(153): This is the amino acid sequence of Human IL-36-alpha protein.
KIDTPQQGSIQDINHRVWVLQDQTLIAVPRKDRMSPVTIALISCRHVETLEKDRGNPIYLGLNGLNLCLMCAKVGDQPTLQLKEKDIMDLYNQPEPVKSFLFYHSQSGRNSTFESVAFPGWFIAVSSEGGCPLILTQELGKANTTDFGLTMLF

SEQ ID NO: 181 - protein, 160 aa, Homo sapiens
  MISC_FEATURE (1)..(160): This is the amino acid sequence of Human IL-36-beta protein.
REAAPKSYAIRDSRQMVWVLSGNSLIAAPLSRSIKPVTLHLIACRDTEFSDKEKGNMVYLGIKGKDLCLFCAEIQGKPTLQLKLQGSQDNIGKDTCWKLVGIHTCINLDVRESCFMGTLDQWGIGVGRKKWKSSFQHHHLRKKDKDFSSMRTNIGMPGRM

SEQ ID NO: 182 - protein, 152 aa, Homo sapiens
  MISC_FEATURE (1)..(152): This is the amino acid sequence of Human IL-36-gamma protein.
SMCKPITGTINDLNQQVWTLQGQNLVAVPRSDSVTPVTVAVITCKYPEALEQGRGDPIYLGIQNPEMCLYCEKVGEQPTLQLKEQKIMDLYGQPEPVKPFLFYRAKTGRTSTLESVAFPDWFIASSKRDQPIILTSELGKSYNTAFELNIND

SEQ ID NO: 183 - protein, 193 aa, Canis lupus familiaris
  MISC_FEATURE (1)..(193): This is the amino acid sequence of Canis IL-37 protein.
MSFLEDSGVKMESEDWERDEPHGCSEGPKVKVSYPEKFSIHDRDHKVLVLDCDTLRAVPFKTYIRPEMFFVLASSLSSASKEKGSPILLAVCKGELCLCCEKDRRQSQPSLQLKKKKLTNLAAQKESARQPFIFYRTKVGSQNRLESAAHPGWFICTSRNSGEPVGVTNVLGKRKHTEFSFHRAETSPSEVSG

SEQ ID NO: 184 - protein, 152 aa, Homo sapiens
  MISC_FEATURE (1)..(152): This is the amino acid sequence of Human IL-38 protein.
MCSLPMARYYIIKYADQKALYTRDGQLLVGDPVADNCCAEKICILPNRGLARTKVPIFLGIQGGSRCLACVETEEGPSLQLEDVNIEELYKGGEEATRFTFFQSSSGSAFRLEAAAWPGWFLCGPAEPQQPVQLTKESEPSARTKFYFEQSW

SEQ ID NO: 185 - protein, 245 aa, Homo sapiens
  MISC_FEATURE (1)..(245): This is the amino acid sequence of Human IL-40 protein.
REEEITPVVSIAYKVLEVFPKGRWVLITCCAPQPPPPITYSLCGTKNIKVAKKVVKTHEPASFNLNVTLKSSPDLLTYFCWASSTSGAHVDSARLQMHWELWSKPVSELRANFTLQDRGAGPRVEMICQASSGSPPITNSLIGKDGQVHLQQRPCHRQPANFSFLPSQTSDWFWCQAANNANVQHSALTVVPPGGDQKMEDWQGPLESPILALPLYRSTRRLSEEEFGGFRIGNGEVRGRKAAAM

SEQ ID NO: 186 - protein, 247 aa, Canis lupus familiaris
  MISC_FEATURE (1)..(247): This is the amino acid sequence of Canis IL-40 isoform X2 protein.
MRLLLLLCLALLATCSFSLEQEVEVTPETFIAYKVREVFPSSRRVVITCHSPRAPPPITYSLWGSQGVEVAKKVVKTGDPASFSINITLKSRPELLTYSCRAASLRGEHSASTKLQMYWELWAKPMAQPRANFVLLERGSGPRVEISCQVSSGSPPITYSLVRKDGYVHRQQRPTYGQPANFSFPLTRTSNWLRCQAANDISVQSSPFRLVPPGYLPQGPVLVLAGSLTSIAAVTSWVLGPALWTRL

SEQ ID NO: 187 - protein, 266 aa, Homo sapiens
  MISC_FEATURE (1)..(266): This is the amino acid sequence of Human IL-41, Meteorin-like protein.
QYSSDRCSWKGSGLTHEAHRKEVEQVYLRCAAGAVEWMYPTGALIVNLRPNTFSPARHLTVCIRSFTDSSGANIYLEKTGELRLLVPDGDGRPGRVQCFGLEQGGLFVEATPQQDIGRRTTGFQYELVRRHRASDLHELSAPCRPCSDTEVLLAVCTSDFAVRGSIQQVTHEPERQDSAIHLRVSRLYRQKSRVFEPVPEGDGHWQGRVRTLLECGVRPGHGDFLFTGHMHFGEARLGCAPRFKDFQRMYRDAQERGLNPCEVGTD

SEQ ID NO: 188 - protein, 296 aa, Canis lupus familiaris
  MISC_FEATURE (1)..(296): This is the amino acid sequence of Canine IL-41, Meteorin-like protein.
MPPSVMSQMCTFLHRQQFCTNRSFFGFAVALEHRSERFDQIFCGLTHEAHRKEVEQVYLRCSAGSVEWMYPTGALIVNVRPNTFPPSRHLTLCIKPLKDSSGANIYLEKTGELKLLVRDGDRGPGQVRCFGFEQGGLFVEAAPQQDISRRTTGFQYELTSRHAESDLHTLSAPCRPCSDAEVLLAVCTSDFVVRGSIQNVTHVPEQQESAIHLRVSRLYRQKSRVFRPAPEGGGWRGRVATLLECGVRPGRGEFLFTGHMHFGEARLGCAPRFKDFQRMYQDAEERGLNPCEMGKD

SEQ ID NO: 189 - protein, 266 aa, Felis catus
  MISC_FEATURE (1)..(266): This is the amino acid sequence of Feline IL-41, Meteorin-like protein.
QYSSDRCSWKGSGLTHEAHRKEVEQVYLRCSAGSVEWMYPTGALIVNVRPNTFPPSRRHLTLCIKPLRDSSGANIYLEKTGELQLLVRDGDRGPRQVHCFGFEQRGLFVEATPQQDISRRTTGFQYELTSRHAESDLRAQSAPCRPCSDTEVLLAVCTSDFVVRGSIQDVTHEPEQQESAIHLHVNRLYRQKSTVFRPAPEGGGWRGHVTTLLECGVRPGRGEFLFTGPIHFGEAHLGCAPRFKDFQRMYKDAEEKGLNPCEMGTE

SEQ ID NO: 190 - protein, 143 aa, Bos taurus
  MISC_FEATURE (1)..(143): This is the amino acid sequence of Bovine interferon-gamma protein.
QGQFFREIENLKEYFNASSPDVAKGGPLFSEILKNWKDESDKKIIQSQIVSFYFKLFENLKDNQVIQRSMDIIKQDMFQKFLNGSSEKLEDFKKLIQIPVDDLQIQRKAINELIKVMNDLSPKSNLRKRKRSQNLFRGRRASM

SEQ ID NO: 191 - protein, 143 aa, Canis lupus familiaris
  MISC_FEATURE (1)..(143): This is the amino acid sequence of Canis interferon-gamma protein.
QAMFFKEIENLKEYFNASNPDVSDGGSLFVDILKKWREESDKTIIQSQIVSFYLKLFDNFKDNQIIQRSMDTIKEDMLGKFLNSSTSKREDFLKLIQIPVNDLQVQRKAINELIKVMNDLSPRSNLRKRKRSQNLFRGRRASK

SEQ ID NO: 192 - protein, 144 aa, Felis catus
  MISC_FEATURE (1)..(144): This is the amino acid sequence of Felis interferon-gamma protein.
QAMFFKEIEELKGYFNASNPDVADGGSLFVDILKNWKEESDKTIIQSQIVSFYLKMFENLKDDDQRIQRSMDTIKEDMLDKLLNTSSSKRDDFLKLIQIPVNDLQVQRKAINELFKVMNDLSPRSNLRKRKRSQNLFRGRRASK

SEQ ID NO: 193 - protein, 166 aa, Bos taurus
  MISC_FEATURE (1)..(166): This is the amino acid sequence of Bovine interferon-alpha A protein.
CHLPHTHSLANRRVLMLLQQLRRVSPSSCLQDRNDFEFLQEALGGSQLQKAQAISVLHEVTQHTFQLFSTEGSPATWDKSLLDKLRAALDQQLTDLQACLTQEEGLRGAPLLKEDSSLAVRKYFHRLTLYLQEKRHSPCAWEVVRAEVMRAFSSSTNLQESFRRKD

SEQ ID NO: 194 - protein, 164 aa, Canis lupus familiaris
  MISC_FEATURE (1)..(164): This is the amino acid sequence of Canine interferon-alpha 1 of 2 protein.
CHLPDTHGLRNWRVLTLLGQMRRLSAGSCDHYTNDFAFPKELFDGQRLQEAQALSVVHVMTQKVFHLFCPDTSSAPWNMTLLEELCSGLSEQLDDLEACPLQEAGLAETPLMHEDSTLRTYFQRISLYLQDRNHSPCAWEMVRAEIGRSFFSSTILQERIRRRK

SEQ ID NO: 195 - protein, 171 aa, Felis catus
  MISC_FEATURE (1)..(171): This is the amino acid sequence of Feline interferon-alpha protein.
CDLPQTHGLLNRRALTLLGQMRRLPASSCQKDRNDFAFPQDVFGGDQSHKAQALSVVHVTNQKIFHFFCTEASSSAAWNTTLLEEFCTGLDRQLTRLEACVLQEVEEGEAPLTNEDIHPEDSILRNYFQRLSLYLQEKKYSPCAWEIVRAEIMRSLYYSSTALQKRLRSEK

SEQ ID NO: 196 - protein, 126 aa, Bos taurus
  MISC_FEATURE (1)..(126): This is the amino acid sequence of Bovine Granulocyte-macrophage colony-stimulating factor protein.
APTRPPNTATRPWQHVDAIKEALSLLNHSSDTDAVMNDTEVVSEKFDSQEPTCLQTRLKLYKNGLQGSLTSLMGSLTMMATHYEKHCPPTPETSCGTQFISFKNFKEDLKEFLFIIPFDCWEPAQK

SEQ ID NO: 197 - protein, 127 aa, Canis lupus familiaris
  MISC_FEATURE (1)..(127): This is the amino acid sequence of Canine Granulocyte-macrophage colony-stimulating factor protein.
APTRSPTLVTRPSQHVDAIQEALSLLNNSNDVTAVMNKAVKVVSEVFDPEGPTCLETRLQLYKEGLQGSLTSLKNPLTMMANHYKQHCPPTPESPCATQNINFKSFKENLKDFLFNIPFDCWKPVKK

SEQ ID NO: 198 - protein, 127 aa, Felis catus
  MISC_FEATURE (1)..(127): This is the amino acid sequence of Feline GM-CSF protein.
APTSSPSSVTRPWQHVDAIKEALSLLNNSSEITAVMNEAVEVVSEMFDPEEPKCMQTHLKLYEQGLRGSLISLKEPLRMMANHYKQHCPLTPETPCETQTITFKNFKENLKDFLFNIPFDCWEPDQK

SEQ ID NO: 199 - protein, 174 aa, Bos taurus
  MISC_FEATURE (1)..(174): This is the amino acid sequence of Bovine Granulocyte colony-stimulating factor protein.
TPLGPARSLPQSFLLKCLEQVRKIQADGAELQERLCAAHKLCHPEELMLLRHSLGIPQAPLSSCSSQSLQLTSCLNQLHGGLFLYQGLLQALAGISPELAPTLDTLQLDVTDFATNIWLQMEDLGAAPAVQPTQGAMPTFTSAFQRRAGGVLVASQLHRFLELAYRGLRYLAEP

SEQ ID NO: 200 - protein, 175 aa, Canis lupus familiaris
  MISC_FEATURE (1)..(175): This is the amino acid sequence of Canine Granulocyte colony-stimulating factor protein.
MAPLGPTGPLPQSFLLKCLEQMRKVQADGTALQETLCATHQLCHPEELVLLGHALGIPQPPLSSCSSQALQLMGCLRQLHSGLFLYQGLLQALAGISPELAPTLDTLQLDTTDFAINIWQQMEDLGMAPAVPPTQGTMPAFTSAFQRRAGGVLVASNLQSFLELAYRALRHFAKP

SEQ ID NO: 201 - protein, 174 aa, Felis catus
  MISC_FEATURE (1)..(174): This is the amino acid sequence of Feline Granulocyte colony-stimulating factor protein.
TPLGPTSSLPQSFLLKCLEQVRKVQADGTALQERLCAAHKLCHPEELVLLGHALGIPQAPLSSCSSQALQLTGCLRQLHSGLFLYQGLLQALAGISPELAPTLDMLQLDITDFAINIWQQMEDVGMAPAVPPTQGTMPTFTSAFQRRAGGTLVASNLQSFLEVAYRALRHFTKP

SEQ ID NO: 202 - protein, 516 aa, Artificial Sequence
  This is the amino acid sequence of pig IL-31 polyprotein.
MAPTSVPSPEEQKGIIKELQASVKKVLKDYEEKEKGVQEQERFQIPCLTFNPQSPHNIESSAILPYLRAIKRSFDNDDDIIDIINHLHKLKFQQGPETTVPVPTNSFEGKSFTLSILKAFSKCLTSDFNSHDPRRGQSGSGGQYIKANSKFIGITELAGSGMAPTSVPSPEEQKGIIKELQASVKKVLKDYEEKEKGVQEQERFQIPCLTFNPQSPHNIESSAILPYLRAIKRSFDNDDDIIDIINHLHKLKFQQGPETTVPVPTNSFEGKSFTLSILKAFSKCLTSDFNSHDPRRGQSAGSGFNNFTVSFWLRVPKVSASHLESGGSMAPTSVPSPEEQKGIIKELQASVKKVLKDYEEKEKGVQEQERFQIPCLTFNPQSPHNIESSAILPYLRAIKRSFDNDDDIIDIINHLHKLKFQQGPETTVPVPTNSFEGKSFTLSILKAFSKCLTSDFNSHDPRRGQSAGSGFNNFTVSFWLRVPKVSASHLEGSGGQYIKANSKFIGITELHHHHHH

SEQ ID NO: 203 - protein, 525 aa, Artificial Sequence
  This is the amino acid sequence of human IL-31 polyprotein.
SHTLPVRLLRPSDDVQKIVEELQSLSKMLLKDVEEEKGVLVSQNYTLPCLSPDAQPPNNIHSPAIRAYLKTIRQLDNKSVIDEIIEHLDKLIFQDAPETNISVPTDTHECKRFILTISQQFSECMDLALKSLTSGAQQATTGSGGQYIKANSKFIGITELAGSGSHTLPVRLLRPSDDVQKIVEELQSLSKMLLKDVEEEKGVLVSQNYTLPCLSPDAQPPNNIHSPAIRAYLKTIRQLDNKSVIDEIIEHLDKLIFQDAPETNISVPTDTHECKRFILTISQQFSECMDLALKSLTSGAQQATTAGSGFNNFTVSFWLRVPKVSASHLESGGSSHTLPVRLLRPSDDVQKIVEELQSLSKMLLKDVEEEKGVLVSQNYTLPCLSPDAQPPNNIHSPAIRAYLKTIRQLDNKSVIDEIIEHLDKLIFQDAPETNISVPTDTHECKRFILTISQQFSECMDLALKSLTSGAQQATTAGSGFNNFTVSFWLRVPKVSASHLEGSGGQYIKANSKFIGITELHHHHHH

SEQ ID NO: 204 - protein, 429 aa, Artificial Sequence
  This is the amino acid sequence of cat IL-4 polyprotein.
QNFNNTLKEIIKTLNILTARNDSCMELTVMDVLAAPKNTSDKEIFCRATTVLRQIYTHHNCSTKFLKGLDRNLSSMANRTCSVNEVKKCTLKDFLERLKAIMQKKYSKHGSGGQYIKANSKFIGITELAGSGQNFNNTLKEIIKTLNILTARNDSCMELTVMDVLAAPKNTSDKEIFCRATTVLRQIYTHHNCSTKFLKGLDRNLSSMANRTCSVNEVKKCTLKDFLERLKAIMQKKYSKHAGSGFNNFTVSFWLRVPKVSASHLESGGSQNFNNTLKEIIKTLNILTARNDSCMELTVMDVLAAPKNTSDKEIFCRATTVLRQIYTHHNCSTKFLKGLDRNLSSMANRTCSVNEVKKCTLKDFLERLKAIMQKKYSKHAGSGFNNFTVSFWLRVPKVSASHLEGSGGQYIKANSKFIGITELHHHHHH

SEQ ID NO: 205 - protein, 429 aa, Artificial Sequence
  This is the amino acid sequence of pig IL-4 polyprotein.
HKCDITLQEIIKTLNILTARKNSCMELPVTDVFAAPENTTEKETFCRASTVLRHIYRHHTCMKSLLSGLDRNLSSMANMTCSVHEAKKSTLKDFLERLKTIMKEKYSKCGSGGQYIKANSKFIGITELAGSGHKCDITLQEIIKTLNILTARKNSCMELPVTDVFAAPENTTEKETFCRASTVLRHIYRHHTCMKSLLSGLDRNLSSMANMTCSVHEAKKSTLKDFLERLKTIMKEKYSKCAGSGFNNFTVSFWLRVPKVSASHLESGGSHKCDITLQEIIKTLNILTARKNSCMELPVTDVFAAPENTTEKETFCRASTVLRHIYRHHTCMKSLLSGLDRNLSSMANMTCSVHEAKKSTLKDFLERLKTIMKEKYSKCAGSGFNNFTVSFWLRVPKVSASHLEGSGGQYIKANSKFIGITELHHHHHH

SEQ ID NO: 206 - protein, 450 aa, Artificial Sequence
  This is the amino acid sequence of chicken IL-4 polyprotein.
VPMLCLQLSVPLMESIRIVNDIQGEVSCVKMNVTDIFADNKTNNKTELLCKASTIVWESQHCHKNLQGLFLNMRQLLNASSTSLKAPCPTAAGNTTSMEKFLADLRTFFHQLAKNKGSGGQYIKANSKFIGITELAGSGVPMLCLQLSVPLMESIRIVNDIQGEVSCVKMNVTDIFADNKTNNKTELLCKASTIVWESQHCHKNLQGLFLNMRQLLNASSTSLKAPCPTAAGNTTSMEKFLADLRTFFHQLAKNKAGSGFNNFTVSFWLRVPKVSASHLESGGSVPMLCLQLSVPLMESIRIVNDIQGEVSCVKMNVTDIFADNKTNNKTELLCKASTIVWESQHCHKNLQGLFLNMRQLLNASSTSLKAPCPTAAGNTTSMEKFLADLRTFFHQLAKNKAGSGFNNFTVSFWLRVPKVSASHLEGSGGQYIKANSKFIGITELHHHHHH

SEQ ID NO: 207 - protein, 435 aa, Artificial Sequence
  This is the amino acid sequence of bovine IL-4 polyprotein.
HKCDITLAEIIKTLNILTTRKNSCMELPVADVFAAPKNTTEKETFCRVGIELRRIYRSHTCLNKFLGGLDRNLNSLASKTCSVNEAKTSTSTLKDLLERLKTIMKEKYSKCGSGGQYIKANSKFIGITELAGSGHKCDITLAEIIKTLNILTTRKNSCMELPVADVFAAPKNTTEKETFCRVGIELRRIYRSHTCLNKFLGGLDRNLNSLASKTCSVNEAKTSTSTLKDLLERLKTIMKEKYSKCAGSGFNNFTVSFWLRVPKVSASHLESGGSHKCDITLAEIIKTLNILTTRKNSCMELPVADVFAAPKNTTEKETFCRVGIELRRIYRSHTCLNKFLGGLDRNLNSLASKTCSVNEAKTSTSTLKDLLERLKTIMKEKYSKCAGSGFNNFTVSFWLRVPKVSASHLEGSGGQYIKANSKFIGITELHHHHHH

SEQ ID NO: 208 - protein, 489 aa, Artificial Sequence
  This is the amino acid sequence of human IL-4 Isoform 1 polyprotein.
HKCDITLQEIIKTLNSLTEQKTLCTELTVTDIFAASKNTTEKETFCRAATVLRQFYSHHEKDTRCLGATAQQFHRHKQLIRFLKRLDRNLWGLAGLNSCPVKEANQSTLENFLERLKTIMREKYSKCSSGSGGQYIKANSKFIGITELAGSGHKCDITLQEIIKTLNSLTEQKTLCTELTVTDIFAASKNTTEKETFCRAATVLRQFYSHHEKDTRCLGATAQQFHRHKQLIRFLKRLDRNLWGLAGLNSCPVKEANQSTLENFLERLKTIMREKYSKCSSAGSGFNNFTVSFWLRVPKVSASHLESGGSHKCDITLQEIIKTLNSLTEQKTLCTELTVTDIFAASKNTTEKETFCRAATVLRQFYSHHEKDTRCLGATAQQFHRHKQLIRFLKRLDRNLWGLAGLNSCPVKEANQSTLENFLERLKTIMREKYSKCSSAGSGFNNFTVSFWLRVPKVSASHLEGSGGQYIKANSKFIGITELHHHHHH

SEQ ID NO: 209 - protein, 441 aa, Artificial Sequence
  This is the amino acid sequence of human IL-4 Isoform 2 polyprotein.
HKCDITLQEIIKTLNSLTEQKNTTEKETFCRAATVLRQFYSHHEKDTRCLGATAQQFHRHKQLIRFLKRLDRNLWGLAGLNSCPVKEANQSTLENFLERLKTIMREKYSKCSSGSGGQYIKANSKFIGITELAGSGHKCDITLQEIIKTLNSLTEQKNTTEKETFCRAATVLRQFYSHHEKDTRCLGATAQQFHRHKQLIRFLKRLDRNLWGLAGLNSCPVKEANQSTLENFLERLKTIMREKYSKCSSAGSGFNNFTVSFWLRVPKVSASHLESGGSHKCDITLQEIIKTLNSLTEQKNTTEKETFCRAATVLRQFYSHHEKDTRCLGATAQQFHRHKQLIRFLKRLDRNLWGLAGLNSCPVKEANQSTLENFLERLKTIMREKYSKCSSAGSGFNNFTVSFWLRVPKVSASHLEGSGGQYIKANSKFIGITELHHHHHH

SEQ ID NO: 210 - protein, 447 aa, Artificial Sequence
  This is the amino acid sequence of cat IL-5 polyprotein.
IAVQSPMNRLVAETLALLSTHRTLLIGDGNLMIPTPEHNNHQLCIEEVFQGIDTLKNRTVPGDAVEKLFRNLSLIKEHIDRQKKKCGGERWRVKKFLDYLQVFLGVINTEWTMESGSGGQYIKANSKFIGITELAGSGIAVQSPMNRLVAETLALLSTHRTLLIGDGNLMIPTPEHNNHQLCIEEVFQGIDTLKNRTVPGDAVEKLFRNLSLIKEHIDRQKKKCGGERWRVKKFLDYLQVFLGVINTEWTMESAGSGFNNFTVSFWLRVPKVSASHLESGGSIAVQSPMNRLVAETLALLSTHRTLLIGDGNLMIPTPEHNNHQLCIEEVFQGIDTLKNRTVPGDAVEKLFRNLSLIKEHIDRQKKKCGGERWRVKKFLDYLQVFLGVINTEWTMESAGSGFNNFTVSFWLRVPKVSASHLEGSGGQYIKANSKFIGITELHHHHHH

SEQ ID NO: 211 - protein, 441 aa, Artificial Sequence
  This is the amino acid sequence of pig IL-5 polyprotein.
VENTMNRLVAETLTLLSIHRTLLIGDGNLMISTPVHTNHQLCIEEVFQGIDTLKNQTARGDAVEKLFQNLSLIKEYIDRQKKNCGGERWRVTQFLDYLQVFLGVINTEWTMESGSGGQYIKANSKFIGITELAGSGVENTMNRLVAETLTLLSIHRTLLIGDGNLMISTPVHTNHQLCIEEVFQGIDTLKNQTARGDAVEKLFQNLSLIKEYIDRQKKNCGGERWRVTQFLDYLQVFLGVINTEWTMESAGSGFNNFTVSFWLRVPKVSASHLESGGSVENTMNRLVAETLTLLSIHRTLLIGDGNLMISTPVHTNHQLCIEEVFQGIDTLKNQTARGDAVEKLFQNLSLIKEYIDRQKKNCGGERWRVTQFLDYLQVFLGVINTEWTMESAGSGFNNFTVSFWLRVPKVSASHLEGSGGQYIKANSKFIGITELHHHHHH

SEQ ID NO: 212 - protein, 432 aa, Artificial Sequence
  This is the amino acid sequence of chicken IL-5 126 aa polyprotein.
TPLRSNLAELQTWLQQIYQSVDMLNLRIETPVSADDENCIKTLFEGTALLKNNPEMRRFGTFFQSFDKLRPSLTAQLTGEGECDTERKNVKKFIEKLRTFIRKLSRDARVGSGGQYIKANSKFIGITELAGSGTPLRSNLAELQTWLQQIYQSVDMLNLRIETPVSADDENCIKTLFEGTALLKNNPEMRRFGTFFQSFDKLRPSLTAQLTGEGECDTERKNVKKFIEKLRTFIRKLSRDARVAGSGFNNFTVSFWLRVPKVSASHLESGGSTPLRSNLAELQTWLQQIYQSVDMLNLRIETPVSADDENCIKTLFEGTALLKNNPEMRRFGTFFQSFDKLRPSLTAQLTGEGECDTERKNVKKFIEKLRTFIRKLSRDARVAGSGFNNFTVSFWLRVPKVSASHLEGSGGQYIKANSKFIGITELHHHHHH

SEQ ID NO: 213 - protein, 462 aa, Artificial Sequence
  This is the amino acid sequence of chicken IL-5 136 aa polyprotein.
TPLRSNLAELQTWLQQIYQSVDMLVSSIFYFCSMNLRIETPVSADDENCIKTLFEGTALLKNNPEMRRFGTFFQSFDKLRPSLTAQLTGEGECDTERKNVKKFIEKLRTFIRKLSRDARVGSGGQYIKANSKFIGITELAGSGTPLRSNLAELQTWLQQIYQSVDMLVSSIFYFCSMNLRIETPVSADDENCIKTLFEGTALLKNNPEMRRFGTFFQSFDKLRPSLTAQLTGEGECDTERKNVKKFIEKLRTFIRKLSRDARVAGSGFNNFTVSFWLRVPKVSASHLESGGSTPLRSNLAELQTWLQQIYQSVDMLVSSIFYFCSMNLRIETPVSADDENCIKTLFEGTALLKNNPEMRRFGTFFQSFDKLRPSLTAQLTGEGECDTERKNVKKFIEKLRTFIRKLSRDARVAGSGFNNFTVSFWLRVPKVSASHLEGSGGQYIKANSKFIGITELHHHHHH

SEQ ID NO: 214 - protein, 441 aa, Artificial Sequence
  This is the amino acid sequence of bovine IL-5 polyprotein.
VESTMNRLVAETLTLLSSHRTLLIGDGNLMIPTPQHTNHQLCIEEVFQGIDTLKNQTAQGDAVKKIFQNLSLIKEYIDLQKRKCGGERWRVKQFLDYLQVFLGVINTEWTMESGSGGQYIKANSKFIGITELAGSGVESTMNRLVAETLTLLSSHRTLLIGDGNLMIPTPQHTNHQLCIEEVFQGIDTLKNQTAQGDAVKKIFQNLSLIKEYIDLQKRKCGGERWRVKQFLDYLQVFLGVINTEWTMESAGSGFNNFTVSFWLRVPKVSASHLESGGSVESTMNRLVAETLTLLSSHRTLLIGDGNLMIPTPQHTNHQLCIEEVFQGIDTLKNQTAQGDAVKKIFQNLSLIKEYIDLQKRKCGGERWRVKQFLDYLQVFLGVINTEWTMESAGSGFNNFTVSFWLRVPKVSASHLEGSGGQYIKANSKFIGITELHHHHHH

SEQ ID NO: 215 - protein, 447 aa, Artificial Sequence
  This is the amino acid sequence of human IL-5 polyprotein.
IPTEIPTSALVKETLALLSTHRTLLIANETLRIPVPVHKNHQLCTEEIFQGIGTLESQTVQGGTVERLFKNLSLIKKYIDGQKKKCGEERRRVNQFLDYLQEFLGVMNTEWIIESGSGGQYIKANSKFIGITELAGSGIPTEIPTSALVKETLALLSTHRTLLIANETLRIPVPVHKNHQLCTEEIFQGIGTLESQTVQGGTVERLFKNLSLIKKYIDGQKKKCGEERRRVNQFLDYLQEFLGVMNTEWIIESAGSGFNNFTVSFWLRVPKVSASHLESGGSIPTEIPTSALVKETLALLSTHRTLLIANETLRIPVPVHKNHQLCTEEIFQGIGTLESQTVQGGTVERLFKNLSLIKKYIDGQKKKCGEERRRVNQFLDYLQEFLGVMNTEWIIESAGSGFNNFTVSFWLRVPKVSASHLEGSGGQYIKANSKFIGITELHHHHHH

SEQ ID NO: 216 - protein, 438 aa, Artificial Sequence
  This is the amino acid sequence of cat IL-13 polyprotein.
SPGPHSRRELKELIEELVNITQNQVSLCNGSMVWSVNLTTGMYCAALESLINVSDCTAIQRTQRMLKALCTQKPSAGQTASERSRDTKIEVIQLVKNLLNHLRRNFRHGNFKGSGGQYIKANSKFIGITELAGSGSPGPHSRRELKELIEELVNITQNQVSLCNGSMVWSVNLTTGMYCAALESLINVSDCTAIQRTQRMLKALCTQKPSAGQTASERSRDTKIEVIQLVKNLLNHLRRNFRHGNFKAGSGFNNFTVSFWLRVPKVSASHLESGGSSPGPHSRRELKELIEELVNITQNQVSLCNGSMVWSVNLTTGMYCAALESLINVSDCTAIQRTQRMLKALCTQKPSAGQTASERSRDTKIEVIQLVKNLLNHLRRNFRHGNFKAGSGFNNFTVSFWLRVPKVSASHLEGSGGQYIKANSKFIGITELHHHHHH

SEQ ID NO: 217 - protein, 441 aa, Artificial Sequence
  This is the amino acid sequence of pig IL-13 polyprotein.
SPGPVPPHSTALKELIEELVNITQNQKTPLCNGSMVWSVNLTTSMQYCAALESLINISDCSAIQKTQRMLSALCSHKPPSEQVPGKHIRDTKIEVAQFVKDLLKHLRMIFRHGGSGGQYIKANSKFIGITELAGSGSPGPVPPHSTALKELIEELVNITQNQKTPLCNGSMVWSVNLTTSMQYCAALESLINISDCSAIQKTQRMLSALCSHKPPSEQVPGKHIRDTKIEVAQFVKDLLKHLRMIFRHGAGSGFNNFTVSFWLRVPKVSASHLESGGSSPGPVPPHSTALKELIEELVNITQNQKTPLCNGSMVWSVNLTTSMQYCAALESLINISDCSAIQKTQRMLSALCSHKPPSEQVPGKHIRDTKIEVAQFVKDLLKHLRMIFRHGAGSGFNNFTVSFWLRVPKVSASHLEGSGGQYIKANSKFIGITELHHHHHH

SEQ ID NO: 218 - protein, 405 aa, Artificial Sequence
  This is the amino acid sequence of chicken IL-13 polyprotein.
TPLAMNLSKLKLSDITQGIQKLNRGVQLSEQELLCQAATVLDNMTDCKKDYEPLITSLKSLHGMTNCPPSTDNEIYLRNFLPALGNYTQALYRRISATAANGSGGQYIKANSKFIGITELAGSGTPLAMNLSKLKLSDITQGIQKLNRGVQLSEQELLCQAATVLDNMTDCKKDYEPLITSLKSLHGMTNCPPSTDNEIYLRNFLPALGNYTQALYRRISATAANAGSGFNNFTVSFWLRVPKVSASHLESGGSTPLAMNLSKLKLSDITQGIQKLNRGVQLSEQELLCQAATVLDNMTDCKKDYEPLITSLKSLHGMTNCPPSTDNEIYLRNFLPALGNYTQALYRRISATAANAGSGFNNFTVSFWLRVPKVSASHLEGSGGQYIKANSKFIGITELHHHHHH

SEQ ID NO: 219 - protein, 444 aa, Artificial Sequence
  This is the amino acid sequence of bovine IL-13 polyprotein.
SPSPVPSATALKELIEELVNITQNQKVPLCNGSMVWSLNLTSSMYCAALDSLISISNCSVIQRTKRMLNALCPHKPSAKQVSSEYVRDTKIEVAQFLKDLLRHSRIVFRNERFNGSGGQYIKANSKFIGITELAGSGSPSPVPSATALKELIEELVNITQNQKVPLCNGSMVWSLNLTSSMYCAALDSLISISNCSVIQRTKRMLNALCPHKPSAKQVSSEYVRDTKIEVAQFLKDLLRHSRIVFRNERFNAGSGFNNFTVSFWLRVPKVSASHLESGGSSPSPVPSATALKELIEELVNITQNQKVPLCNGSMVWSLNLTSSMYCAALDSLISISNCSVIQRTKRMLNALCPHKPSAKQVSSEYVRDTKIEVAQFLKDLLRHSRIVFRNERFNAGSGFNNFTVSFWLRVPKVSASHLEGSGGQYIKANSKFIGITELHHHHHH

SEQ ID NO: 220 - protein, 468 aa, Artificial Sequence
  This is the amino acid sequence of human IL-13 polyprotein.
LTCLGGFASPGPVPPSTALRELIEELVNITQNQKAPLCNGSMVWSINLTAGMYCAALESLINVSGCSAIEKTQRMLSGFCPHKVSAGQFSSLHVRDTKIEVAQFVKDLLLHLKKLFREGRFNGSGGQYIKANSKFIGITELAGSGLTCLGGFASPGPVPPSTALRELIEELVNITQNQKAPLCNGSMVWSINLTAGMYCAALESLINVSGCSAIEKTQRMLSGFCPHKVSAGQFSSLHVRDTKIEVAQFVKDLLLHLKKLFREGRFNAGSGFNNFTVSFWLRVPKVSASHLESGGSLTCLGGFASPGPVPPSTALRELIEELVNITQNQKAPLCNGSMVWSINLTAGMYCAALESLINVSGCSAIEKTQRMLSGFCPHKVSAGQFSSLHVRDTKIEVAQFVKDLLLHLKKLFREGRFNAGSGFNNFTVSFWLRVPKVSASHLEGSGGQYIKANSKFIGITELHHHHHH

SEQ ID NO: 221 - protein, 840 aa, Artificial Sequence
  This is the amino acid sequence of cat IL-33 Canonical isoform (246 aa) polyprotein.
MKTKMEYSTTKISPAKMNSSAGKALVKSPKLGKSQQKAEEVCQMYFMQLRSGLIKKTACYFKKETTKRHSTRRAGKYKEHLVFTARHQQLERPVEGLAFGVPMVQKCFGTTDVPSIQEYSASLSTYNDQSITFVFEDGSYEIYVEDLGKDQEKDKVLFRYYDFQSPSRETGDADDGHTLLVNLSPTKDKDFLLHANNKEHSVELQKCKKPLPDQAFFRLHRKSSKCVSFECRPAPPFPPDLRILGRGSGGQYIKANSKFIGITELAGSGMKTKMEYSTTKISPAKMNSSAGKALVKSPKLGKSQQKAEEVCQMYFMQLRSGLIKKTACYFKKETTKRHSTRRAGKYKEHLVFTARHQQLERPVEGLAFGVPMVQKCFGTTDVPSIQEYSASLSTYNDQSITFVFEDGSYEIYVEDLGKDQEKDKVLFRYYDFQSPSRETGDADDGHTLLVNLSPTKDKDFLLHANNKEHSVELQKCKKPLPDQAFFRLHRKSSKCVSFECRPAPPFPPDLRILGRAGSGFNNFTVSFWLRVPKVSASHLESGGSMKTKMEYSTTKISPAKMNSSAGKALVKSPKLGKSQQKAEEVCQMYFMQLRSGLIKKTACYFKKETTKRHSTRRAGKYKEHLVFTARHQQLERPVEGLAFGVPMVQKCFGTTDVPSIQEYSASLSTYNDQSITFVFEDGSYEIYVEDLGKDQEKDKVLFRYYDFQSPSRETGDADDGHTLLVNLSPTKDKDFLLHANNKEHSVELQKCKKPLPDQAFFRLHRKSSKCVSFECRPAPPFPPDLRILGRAGSGFNNFTVSFWLRVPKVSASHLEGSGGQYIKANSKFIGITELHHHHHH

SEQ ID NO: 222 - protein, 906 aa, Artificial Sequence
  This is the amino acid sequence of cat IL-33 Other isoform (268 aa) polyprotein.
MKTKMEYSTTKISPAKMNSSAGKALVKSPKLGKSQQKAEEVCQMYFMQLRSGLIKKTACYFKKETTKRHSTRRAGKYKEHLVFTARHQQLERPVEGLAFGVPMVQKCFGTTDVPSIQEYSASLSTYNDQSITFVFEDGSYEIYVEDLGKDQEKDKVLFRYYDFQSPSRETGDADDGHTLLVNLSPTKDKDFLLHANNKEHSVELQKCKKPLPDQAFFRLHRKSSKCVSFECKNDPGVFIGVKDNHLALIKVEDQTEYFSTENIIFKLSGSGGQYIKANSKFIGITELAGSGMKTKMEYSTTKISPAKMNSSAGKALVKSPKLGKSQQKAEEVCQMYFMQLRSGLIKKTACYFKKETTKRHSTRRAGKYKEHLVFTARHQQLERPVEGLAFGVPMVQKCFGTTDVPSIQEYSASLSTYNDQSITFVFEDGSYEIYVEDLGKDQEKDKVLFRYYDFQSPSRETGDADDGHTLLVNLSPTKDKDFLLHANNKEHSVELQKCKKPLPDQAFFRLHRKSSKCVSFECKNDPGVFIGVKDNHLALIKVEDQTEYFSTENIIFKLSAGSGFNNFTVSFWLRVPKVSASHLESGGSMKTKMEYSTTKISPAKMNSSAGKALVKSPKLGKSQQKAEEVCQMYFMQLRSGLIKKTACYFKKETTKRHSTRRAGKYKEHLVFTARHQQLERPVEGLAFGVPMVQKCFGTTDVPSIQEYSASLSTYNDQSITFVFEDGSYEIYVEDLGKDQEKDKVLFRYYDFQSPSRETGDADDGHTLLVNLSPTKDKDFLLHANNKEHSVELQKCKKPLPDQAFFRLHRKSSKCVSFECKNDPGVFIGVKDNHLALIKVEDQTEYFSTENIIFKLSAGSGFNNFTVSFWLRVPKVSASHLEGSGGQYIKANSKFIGITELHHHHHH

SEQ ID NO: 223 - protein, 540 aa, Artificial Sequence
  This is the amino acid sequence of pig IL-33 polyprotein.
KPEVKYSTTKISTAKMNSSAGKVSIKSPKLRNKVLLRYYDSQIPSSETDGGGDHRKLMVNLSPTKDKDFLLHANSKEHSVELQKCENPLPEQAFFVLHEQPSKCVSFECKSHPGVFLGVKNNQLALIKLGEHPEDSNRENTTFKLTGSGGQYIKANSKFIGITELAGSGKPEVKYSTTKISTAKMNSSAGKVSIKSPKLRNKVLLRYYDSQIPSSETDGGGDHRKLMVNLSPTKDKDFLLHANSKEHSVELQKCENPLPEQAFFVLHEQPSKCVSFECKSHPGVFLGVKNNQLALIKLGEHPEDSNRENTTFKLTAGSGFNNFTVSFWLRVPKVSASHLESGGSKPEVKYSTTKISTAKMNSSAGKVSIKSPKLRNKVLLRYYDSQIPSSETDGGGDHRKLMVNLSPTKDKDFLLHANSKEHSVELQKCENPLPEQAFFVLHEQPSKCVSFECKSHPGVFLGVKNNQLALIKLGEHPEDSNRENTTFKLTAGSGFNNFTVSFWLRVPKVSASHLEGSGGQYIKANSKFIGITELHHHHHH

SEQ ID NO: 224 - protein, 921 aa, Artificial Sequence
  This is the amino acid sequence of bovine IL-33 polyprotein.
MKPKMKYSTTKISPAKMKCSAGKALVKSPKLRKSQQKAEEVCQIYYMQLRSGLKIEKKVCYFRKETTKRHSLTAEKYKEHLALVACEQLNHLQQSVEQGFTLGKTMVPYTTATGLPSIKEHSASLSTYNDQFITFVLEDGSYEIYVEDLIDNQEKDKVLLRYYDSQFPSSETDDGGSHRKLMVNLSPTKDKDFLLHANSKEHSVELQKCENQLPEQTFFVLHETSSQCVSFECKSNPGVFLGVKDNQLALIKRGEHPEDSNSQNITFKLSNLMGSGGQYIKANSKFIGITELAGSGMKPKMKYSTTKISPAKMKCSAGKALVKSPKLRKSQQKAEEVCQIYYMQLRSGLKIEKKVCYFRKETTKRHSLTAEKYKEHLALVACEQLNHLQQSVEQGFTLGKTMVPYTTATGLPSIKEHSASLSTYNDQFITFVLEDGSYEIYVEDLIDNQEKDKVLLRYYDSQFPSSETDDGGSHRKLMVNLSPTKDKDFLLHANSKEHSVELQKCENQLPEQTFFVLHETSSQCVSFECKSNPGVFLGVKDNQLALIKRGEHPEDSNSQNITFKLSNLMAGSGFNNFTVSFWLRVPKVSASHLESGGSMKPKMKYSTTKISPAKMKCSAGKALVKSPKLRKSQQKAEEVCQIYYMQLRSGLKIEKKVCYFRKETTKRHSLTAEKYKEHLALVACEQLNHLQQSVEQGFTLGKTMVPYTTATGLPSIKEHSASLSTYNDQFITFVLEDGSYEIYVEDLIDNQEKDKVLLRYYDSQFPSSETDDGGSHRKLMVNLSPTKDKDFLLHANSKEHSVELQKCENQLPEQTFFVLHETSSQCVSFECKSNPGVFLGVKDNQLALIKRGEHPEDSNSQNITFKLSNLMAGSGFNNFTVSFWLRVPKVSASHLEGSGGQYIKANSKFIGITELHHHHHH

SEQ ID NO: 225 - protein, 912 aa, Artificial Sequence
  This is the amino acid sequence of human IL-33 Full length (1-270) polyprotein.
MKPKMKYSTNKISTAKWKNTASKALCFKLGKSQQKAKEVCPMYFMKLRSGLMIKKEACYFRRETTKRPSLKTGRKHKRHLVLAACQQQSTVECFAFGISGVQKYTRALHDSSITGISPITEYLASLSTYNDQSITFALEDESYEIYVEDLKKDEKKDKVLLSYYESQHPSNESGDGVDGKMLMVTLSPTKDFWLHANNKEHSVELHKCEKPLPDQAFFVLHNMHSNCVSFECKTDPGVFIGVKDNHLALIKVDSSENLCTENILFKLSETGSGGQYIKANSKFIGITELAGSGMKPKMKYSTNKISTAKWKNTASKALCFKLGKSQQKAKEVCPMYFMKLRSGLMIKKEACYFRRETTKRPSLKTGRKHKRHLVLAACQQQSTVECFAFGISGVQKYTRALHDSSITGISPITEYLASLSTYNDQSITFALEDESYEIYVEDLKKDEKKDKVLLSYYESQHPSNESGDGVDGKMLMVTLSPTKDFWLHANNKEHSVELHKCEKPLPDQAFFVLHNMHSNCVSFECKTDPGVFIGVKDNHLALIKVDSSENLCTENILFKLSETAGSGFNNFTVSFWLRVPKVSASHLESGGSMKPKMKYSTNKISTAKWKNTASKALCFKLGKSQQKAKEVCPMYFMKLRSGLMIKKEACYFRRETTKRPSLKTGRKHKRHLVLAACQQQSTVECFAFGISGVQKYTRALHDSSITGISPITEYLASLSTYNDQSITFALEDESYEIYVEDLKKDEKKDKVLLSYYESQHPSNESGDGVDGKMLMVTLSPTKDFWLHANNKEHSVELHKCEKPLPDQAFFVLHNMHSNCVSFECKTDPGVFIGVKDNHLALIKVDSSENLCTENILFKLSETAGSGFNNFTVSFWLRVPKVSASHLEGSGGQYIKANSKFIGITELHHHHHH

SEQ ID NO: 226 - protein, 630 aa, Artificial Sequence
  This is the amino acid sequence of human IL-33 Chain 1 (95-270) polyprotein.
AFGISGVQKYTRALHDSSITGISPITEYLASLSTYNDQSITFALEDESYEIYVEDLKKDEKKDKVLLSYYESQHPSNESGDGVDGKMLMVTLSPTKDFWLHANNKEHSVELHKCEKPLPDQAFFVLHNMHSNCVSFECKTDPGVFIGVKDNHLALIKVDSSENLCTENILFKLSETGSGGQYIKANSKFIGITELAGSGAFGISGVQKYTRALHDSSITGISPITEYLASLSTYNDQSITFALEDESYEIYVEDLKKDEKKDKVLLSYYESQHPSNESGDGVDGKMLMVTLSPTKDFWLHANNKEHSVELHKCEKPLPDQAFFVLHNMHSNCVSFECKTDPGVFIGVKDNHLALIKVDSSENLCTENILFKLSETAGSGFNNFTVSFWLRVPKVSASHLESGGSAFGISGVQKYTRALHDSSITGISPITEYLASLSTYNDQSITFALEDESYEIYVEDLKKDEKKDKVLLSYYESQHPSNESGDGVDGKMLMVTLSPTKDFWLHANNKEHSVELHKCEKPLPDQAFFVLHNMHSNCVSFECKTDPGVFIGVKDNHLALIKVDSSENLCTENILFKLSETAGSGFNNFTVSFWLRVPKVSASHLEGSGGQYIKANSKFIGITELHHHHHH

SEQ ID NO: 227 - protein, 618 aa, Artificial Sequence
  This is the amino acid sequence of human IL-33 Chain 2 (99-270) polyprotein.
SGVQKYTRALHDSSITGISPITEYLASLSTYNDQSITFALEDESYEIYVEDLKKDEKKDKVLLSYYESQHPSNESGDGVDGKMLMVTLSPTKDFWLHANNKEHSVELHKCEKPLPDQAFFVLHNMHSNCVSFECKTDPGVFIGVKDNHLALIKVDSSENLCTENILFKLSETGSGGQYIKANSKFIGITELAGSGSGVQKYTRALHDSSITGISPITEYLASLSTYNDQSITFALEDESYEIYVEDLKKDEKKDKVLLSYYESQHPSNESGDGVDGKMLMVTLSPTKDFWLHANNKEHSVELHKCEKPLPDQAFFVLHNMHSNCVSFECKTDPGVFIGVKDNHLALIKVDSSENLCTENILFKLSETAGSGFNNFTVSFWLRVPKVSASHLESGGSSGVQKYTRALHDSSITGISPITEYLASLSTYNDQSITFALEDESYEIYVEDLKKDEKKDKVLLSYYESQHPSNESGDGVDGKMLMVTLSPTKDFWLHANNKEHSVELHKCEKPLPDQAFFVLHNMHSNCVSFECKTDPGVFIGVKDNHLALIKVDSSENLCTENILFKLSETAGSGFNNFTVSFWLRVPKVSASHLEGSGGQYIKANSKFIGITELHHHHHH

SEQ ID NO: 228 - protein, 588 aa, Artificial Sequence
  This is the amino acid sequence of human IL-33 Chain 3 (109-270) polyprotein.
HDSSITGISPITEYLASLSTYNDQSITFALEDESYEIYVEDLKKDEKKDKVLLSYYESQHPSNESGDGVDGKMLMVTLSPTKDFWLHANNKEHSVELHKCEKPLPDQAFFVLHNMHSNCVSFECKTDPGVFIGVKDNHLALIKVDSSENLCTENILFKLSETGSGGQYIKANSKFIGITELAGSGHDSSITGISPITEYLASLSTYNDQSITFALEDESYEIYVEDLKKDEKKDKVLLSYYESQHPSNESGDGVDGKMLMVTLSPTKDFWLHANNKEHSVELHKCEKPLPDQAFFVLHNMHSNCVSFECKTDPGVFIGVKDNHLALIKVDSSENLCTENILFKLSETAGSGFNNFTVSFWLRVPKVSASHLESGGSHDSSITGISPITEYLASLSTYNDQSITFALEDESYEIYVEDLKKDEKKDKVLLSYYESQHPSNESGDGVDGKMLMVTLSPTKDFWLHANNKEHSVELHKCEKPLPDQAFFVLHNMHSNCVSFECKTDPGVFIGVKDNHLALIKVDSSENLCTENILFKLSETAGSGFNNFTVSFWLRVPKVSASHLEGSGGQYIKANSKFIGITELHHHHHH

SEQ ID NO: 229 - protein, 573 aa, Artificial Sequence
  This is the amino acid sequence of canine TNF-alpha polyprotein.
VKSSSRTPSDKPVAHVVANPEAEGQLQWLSRRANALLANGVELTDNQLIVPSDGLYLIYSQVLFKGQGCPSTHVLLTHTISRFAVSYQTKVNLLSAIKSPCQRETPEGTEAKPWYEPIYLGGVFQLEKGDRLSAEINLPNYLDFAESGQVYFGIIALGSGGQYIKANSKFIGITELAGSGVKSSSRTPSDKPVAHVVANPEAEGQLQWLSRRANALLANGVELTDNQLIVPSDGLYLIYSQVLFKGQGCPSTHVLLTHTISRFAVSYQTKVNLLSAIKSPCQRETPEGTEAKPWYEPIYLGGVFQLEKGDRLSAEINLPNYLDFAESGQVYFGIIALAGSGFNNFTVSFWLRVPKVSASHLESGGSVKSSSRTPSDKPVAHVVANPEAEGQLQWLSRRANALLANGVELTDNQLIVPSDGLYLIYSQVLFKGQGCPSTHVLLTHTISRFAVSYQTKVNLLSAIKSPCQRETPEGTEAKPWYEPIYLGGVFQLEKGDRLSAEINLPNYLDFAESGQVYFGIIALAGSGFNNFTVSFWLRVPKVSASHLEGSGGQYIKANSKFIGITELHHHHHH

SEQ ID NO: 230 - protein, 573 aa, Artificial Sequence
  This is the amino acid sequence of feline TNF-alpha polyprotein.
LRSSSRTPSDKPVAHVVANPEAEGQLQWLSRRANALLANGVELTDNQLKVPSDGLYLIYSQVLFTGQGCPSTHVLLTHTISRFAVSYQTKVNLLSAIKSPCQRETPEGAEAKPWYEPIYLGGVFQLEKGDRLSTEINLPAYLDFAESGQVYFGIIALGSGGQYIKANSKFIGITELAGSGLRSSSRTPSDKPVAHVVANPEAEGQLQWLSRRANALLANGVELTDNQLKVPSDGLYLIYSQVLFTGQGCPSTHVLLTHTISRFAVSYQTKVNLLSAIKSPCQRETPEGAEAKPWYEPIYLGGVFQLEKGDRLSTEINLPAYLDFAESGQVYFGIIALAGSGFNNFTVSFWLRVPKVSASHLESGGSLRSSSRTPSDKPVAHVVANPEAEGQLQWLSRRANALLANGVELTDNQLKVPSDGLYLIYSQVLFTGQGCPSTHVLLTHTISRFAVSYQTKVNLLSAIKSPCQRETPEGAEAKPWYEPIYLGGVFQLEKGDRLSTEINLPAYLDFAESGQVYFGIIALAGSGFNNFTVSFWLRVPKVSASHLEGSGGQYIKANSKFIGITELHHHHHH

SEQ ID NO: 231 - protein, 561 aa, Artificial Sequence
  This is the amino acid sequence of bovine IL1-beta polyprotein.
APVQSIKCKLQDREQKSLVLASPCVLKALHLLSQEMNREVVFCMSFVQGEERDNKIPVALGIKDKNLYLSCVKKGDTPTLQLEEVDPKVYPKRNMEKRFVFYKTEIKNTVEFESVLYPNWYISTSQIEERPVFLGHFRGGQDITDFRMETLSPGSGGQYIKANSKFIGITELAGSGAPVQSIKCKLQDREQKSLVLASPCVLKALHLLSQEMNREVVFCMSFVQGEERDNKIPVALGIKDKNLYLSCVKKGDTPTLQLEEVDPKVYPKRNMEKRFVFYKTEIKNTVEFESVLYPNWYISTSQIEERPVFLGHFRGGQDITDFRMETLSPAGSGFNNFTVSFWLRVPKVSASHLESGGSAPVQSIKCKLQDREQKSLVLASPCVLKALHLLSQEMNREVVFCMSFVQGEERDNKIPVALGIKDKNLYLSCVKKGDTPTLQLEEVDPKVYPKRNMEKRFVFYKTEIKNTVEFESVLYPNWYISTSQIEERPVFLGHFRGGQDITDFRMETLSPAGSGFNNFTVSFWLRVPKVSASHLEGSGGQYIKANSKFIGITELHHHHHH

SEQ ID NO: 232 - protein, 558 aa, Artificial Sequence
  This is the amino acid sequence of canine IL1-beta polyprotein.
AAMQSVDCKLQDISHKYLVLSNSYELRALHLNGENVNKQVVFHMSFVHGDESNNKIPVVLGIKQKNLYLSCVMKDGKPTLQLEKVDPKVYPKRKMEKRFVFNKIEIKNTVEFESSQYPNWYISTSQVEGMPVFLGNTRGGQDITDFTMEFSSGSGGQYIKANSKFIGITELAGSGAAMQSVDCKLQDISHKYLVLSNSYELRALHLNGENVNKQVVFHMSFVHGDESNNKIPVVLGIKQKNLYLSCVMKDGKPTLQLEKVDPKVYPKRKMEKRFVFNKIEIKNTVEFESSQYPNWYISTSQVEGMPVFLGNTRGGQDITDFTMEFSSAGSGFNNFTVSFWLRVPKVSASHLESGGSAAMQSVDCKLQDISHKYLVLSNSYELRALHLNGENVNKQVVFHMSFVHGDESNNKIPVVLGIKQKNLYLSCVMKDGKPTLQLEKVDPKVYPKRKMEKRFVFNKIEIKNTVEFESSQYPNWYISTSQVEGMPVFLGNTRGGQDITDFTMEFSSAGSGFNNFTVSFWLRVPKVSASHLEGSGGQYIKANSKFIGITELHHHHHH

SEQ ID NO: 233 - protein, 558 aa, Artificial Sequence
  This is the amino acid sequence of feline IL1-beta polyprotein.
AAIQSQDYTFRDISQKSLVLSGSYELRALHLNGQNMNQQVVFRMSFVHGEENSKKIPVVLCIKKNNLYLSCVMKDGKPTLQLEMLDPKVYPKKKMEKRFVFNKTEIKGNVEFESSQFPNWYISTSQAEEMPVFLGNTKGGQDITDFIMESASGSGGQYIKANSKFIGITELAGSGAAIQSQDYTFRDISQKSLVLSGSYELRALHLNGQNMNQQVVFRMSFVHGEENSKKIPVVLCIKKNNLYLSCVMKDGKPTLQLEMLDPKVYPKKKMEKRFVFNKTEIKGNVEFESSQFPNWYISTSQAEEMPVFLGNTKGGQDITDFIMESASAGSGFNNFTVSFWLRVPKVSASHLESGGSAAIQSQDYTFRDISQKSLVLSGSYELRALHLNGQNMNQQVVFRMSFVHGEENSKKIPVVLCIKKNNLYLSCVMKDGKPTLQLEMLDPKVYPKKKMEKRFVFNKTEIKGNVEFESSQFPNWYISTSQAEEMPVFLGNTKGGQDITDFIMESASAGSGFNNFTVSFWLRVPKVSASHLEGSGGQYIKANSKFIGITELHHHHHH

SEQ ID NO: 234 - protein, 507 aa, Artificial Sequence
  This is the amino acid sequence of dog IL-2 polyprotein.
APITSSSTKETEQQMEQLLLDLQLLLNGVNNYENPQLSRMLTFKFYTPKKATEFTHLQCLAEELKNLEEVLGLPQSKNVHLTDTKELISNMNVTLLKLKGSETSYNCEYDDETATITEFLNKWITFCQSIFSTLTGSGGQYIKANSKFIGITELAGSGAPITSSSTKETEQQMEQLLLDLQLLLNGVNNYENPQLSRMLTFKFYTPKKATEFTHLQCLAEELKNLEEVLGLPQSKNVHLTDTKELISNMNVTLLKLKGSETSYNCEYDDETATITEFLNKWITFCQSIFSTLTAGSGFNNFTVSFWLRVPKVSASHLESGGSAPITSSSTKETEQQMEQLLLDLQLLLNGVNNYENPQLSRMLTFKFYTPKKATEFTHLQCLAEELKNLEEVLGLPQSKNVHLTDTKELISNMNVTLLKLKGSETSYNCEYDDETATITEFLNKWITFCQSIFSTLTAGSGFNNFTVSFWLRVPKVSASHLEGSGGQYIKANSKFIGITELHHHHHH

SEQ ID NO: 235 - protein, 504 aa, Artificial Sequence
  This is the amino acid sequence of cat IL-2 polyprotein.
APASSSTKETQQQLEQLLLDLRLLLNGVNNPENPKLSRMLTFKFYVPKKATELTHLQCLVEELKPLEEVLYLAQSKNFHLNHIKELMSNINVTVLKLKGSETRFTCNYDDETATIVEFLNKWITFCQSIFSTLTGSGGQYIKANSKFIGITELAGSGAPASSSTKETQQQLEQLLLDLRLLLNGVNNPENPKLSRMLTFKFYVPKKATELTHLQCLVEELKPLEEVLYLAQSKNFHLNHIKELMSNINVTVLKLKGSETRFTCNYDDETATIVEFLNKWITFCQSIFSTLTAGSGFNNFTVSFWLRVPKVSASHLESGGSAPASSSTKETQQQLEQLLLDLRLLLNGVNNPENPKLSRMLTFKFYVPKKATELTHLQCLVEELKPLEEVLYLAQSKNFHLNHIKELMSNINVTVLKLKGSETRFTCNYDDETATIVEFLNKWITFCQSIFSTLTAGSGFNNFTVSFWLRVPKVSASHLEGSGGQYIKANSKFIGITELHHHHHH

SEQ ID NO: 236 - protein, 501 aa, Artificial Sequence
  This is the amino acid sequence of human IL-2 polyprotein.
APTSSSTKKTQLQLEHLLLDLQMILNGINNYKNPKLTRMLTFKFYMPKKATELKHLQCLEEELKPLEEVLNLAQSKNFHLRPRDLISNINVIVLELKGSETTFMCEYADETATIVEFLNRWITFCQSIISTLTGSGGQYIKANSKFIGITELAGSGAPTSSSTKKTQLQLEHLLLDLQMILNGINNYKNPKLTRMLTFKFYMPKKATELKHLQCLEEELKPLEEVLNLAQSKNFHLRPRDLISNINVIVLELKGSETTFMCEYADETATIVEFLNRWITFCQSIISTLTAGSGFNNFTVSFWLRVPKVSASHLESGGSAPTSSSTKKTQLQLEHLLLDLQMILNGINNYKNPKLTRMLTFKFYMPKKATELKHLQCLEEELKPLEEVLNLAQSKNFHLRPRDLISNINVIVLELKGSETTFMCEYADETATIVEFLNRWITFCQSIISTLTAGSGFNNFTVSFWLRVPKVSASHLEGSGGQYIKANSKFIGITELHHHHHH

SEQ ID NO: 237 - protein, 462 aa, Artificial Sequence
  This is the amino acid sequence of dog IL-3 polyprotein.
RPFSTDLPKQYFTMINEIMEMLNKSPSPSEEPLDSNEKETLLEDTLLRPNLDVFLNASSKFHKNGLLIWNNLKEFLPLLPTPTPRGEPISIMENNWGDFQRKLKKYLEALDNFLNFKNKPGSGGQYIKANSKFIGITELAGSGRPFSTDLPKQYFTMINEIMEMLNKSPSPSEEPLDSNEKETLLEDTLLRPNLDVFLNASSKFHKNGLLIWNNLKEFLPLLPTPTPRGEPISIMENNWGDFQRKLKKYLEALDNFLNFKNKPAGSGFNNFTVSFWLRVPKVSASHLESGGSRPFSTDLPKQYFTMINEIMEMLNKSPSPSEEPLDSNEKETLLEDTLLRPNLDVFLNASSKFHKNGLLIWNNLKEFLPLLPTPTPRGEPISIMENNWGDFQRKLKKYLEALDNFLNFKNKPAGSGFNNFTVSFWLRVPKVSASHLEGSGGQYIKANSKFIGITELHHHHHH

SEQ ID NO: 238 - protein, 501 aa, Artificial Sequence
  This is the amino acid sequence of human IL-3 polyprotein.
APMTQTTPLKTSWVNCSNMIDEIITHLKQPPLPLLDFNNLNGEDQDILMENNLRRPNLEAFNRAVKSLQNASAIESILKNLLPCLPLATAAPTRHPIHIKDGDWNEFRRKLTFYLKTLENAQAQQTTLSLAIFGSGGQYIKANSKFIGITELAGSGAPMTQTTPLKTSWVNCSNMIDEIITHLKQPPLPLLDFNNLNGEDQDILMENNLRRPNLEAFNRAVKSLQNASAIESILKNLLPCLPLATAAPTRHPIHIKDGDWNEFRRKLTFYLKTLENAQAQQTTLSLAIFAGSGFNNFTVSFWLRVPKVSASHLESGGSAPMTQTTPLKTSWVNCSNMIDEIITHLKQPPLPLLDFNNLNGEDQDILMENNLRRPNLEAFNRAVKSLQNASAIESILKNLLPCLPLATAAPTRHPIHIKDGDWNEFRRKLTFYLKTLENAQAQQTTLSLAIFAGSGFNNFTVSFWLRVPKVSASHLEGSGGQYIKANSKFIGITELHHHHHH

SEQ ID NO: 239 - protein, 663 aa, Artificial Sequence
  This is the amino acid sequence of dog IL-6 polyprotein.
FPTPGPLAGDSKDDATSNSLPLTSANKVEELIKYILGKISALRKEMCDKFNKCEDSKEALAENNLHLPKLEGKDGCFQSGFNQETCLTRITTGLVEFQLHLNILQNNYEGDKENVKSVHMSTKILVQMLKSKVKNQDEVTTPDPTTDASLQAILQSQDECVKHTTIHLILRSLEDFLQFSLRAVRIMGSGGQYIKANSKFIGITELAGSGFPTPGPLAGDSKDDATSNSLPLTSANKVEELIKYILGKISALRKEMCDKFNKCEDSKEALAENNLHLPKLEGKDGCFQSGFNQETCLTRITTGLVEFQLHLNILQNNYEGDKENVKSVHMSTKILVQMLKSKVKNQDEVTTPDPTTDASLQAILQSQDECVKHTTIHLILRSLEDFLQFSLRAVRIMAGSGFNNFTVSFWLRVPKVSASHLESGGSFPTPGPLAGDSKDDATSNSLPLTSANKVEELIKYILGKISALRKEMCDKFNKCEDSKEALAENNLHLPKLEGKDGCFQSGFNQETCLTRITTGLVEFQLHLNILQNNYEGDKENVKSVHMSTKILVQMLKSKVKNQDEVTTPDPTTDASLQAILQSQDECVKHTTIHLILRSLEDFLQFSLRAVRIMAGSGFNNFTVSFWLRVPKVSASHLEGSGGQYIKANSKFIGITELHHHHHH

SEQ ID NO: 240 - protein, 645 aa, Artificial Sequence
  This is the amino acid sequence of cat IL-6 polyprotein.
TPGPLGGDATSNRLPLTSADKMEELIKYILGKISALKKEMCDNYNKCEDSKEALAENNLNLPKLAEKDGCFQSGFNQETCLTRITTGLQEFQIYLKFLQDKYEGDEENAKSVYTSTNVLLQMLKRKGKNQDEVTIPVPTVEVGLQAKLQSQEEWLRHTTIHLTLRRLEDFLQFSLRAVRIMGSGGQYIKANSKFIGITELAGSGTPGPLGGDATSNRLPLTSADKMEELIKYILGKISALKKEMCDNYNKCEDSKEALAENNLNLPKLAEKDGCFQSGFNQETCLTRITTGLQEFQIYLKFLQDKYEGDEENAKSVYTSTNVLLQMLKRKGKNQDEVTIPVPTVEVGLQAKLQSQEEWLRHTTIHLTLRRLEDFLQFSLRAVRIMAGSGFNNFTVSFWLRVPKVSASHLESGGSTPGPLGGDATSNRLPLTSADKMEELIKYILGKISALKKEMCDNYNKCEDSKEALAENNLNLPKLAEKDGCFQSGFNQETCLTRITTGLQEFQIYLKFLQDKYEGDEENAKSVYTSTNVLLQMLKRKGKNQDEVTIPVPTVEVGLQAKLQSQEEWLRHTTIHLTLRRLEDFLQFSLRAVRIMAGSGFNNFTVSFWLRVPKVSASHLEGSGGQYIKANSKFIGITELHHHHHH

SEQ ID NO: 241 - protein, 651 aa, Artificial Sequence
  This is the amino acid sequence of human IL-6 polyprotein.
VPPGEDSKDVAAPHRQPLTSSERIDKQIRYILDGISALRKETCNKSNMCESSKEALAENNLNLPKMAEKDGCFQSGFNEETCLVKIITGLLEFEVYLEYLQNRFESSEEQARAVQMSTKVLIQFLQKKAKNLDAITTPDPTTNASLLTKLQAQNQWLQDMTTHLILRSFKEFLQSSLRALRQMGSGGQYIKANSKFIGITELAGSGVPPGEDSKDVAAPHRQPLTSSERIDKQIRYILDGISALRKETCNKSNMCESSKEALAENNLNLPKMAEKDGCFQSGFNEETCLVKIITGLLEFEVYLEYLQNRFESSEEQARAVQMSTKVLIQFLQKKAKNLDAITTPDPTTNASLLTKLQAQNQWLQDMTTHLILRSFKEFLQSSLRALRQMAGSGFNNFTVSFWLRVPKVSASHLESGGSVPPGEDSKDVAAPHRQPLTSSERIDKQIRYILDGISALRKETCNKSNMCESSKEALAENNLNLPKMAEKDGCFQSGFNEETCLVKIITGLLEFEVYLEYLQNRFESSEEQARAVQMSTKVLIQFLQKKAKNLDAITTPDPTTNASLLTKLQAQNQWLQDMTTHLILRSFKEFLQSSLRALRQMAGSGFNNFTVSFWLRVPKVSASHLEGSGGQYIKANSKFIGITELHHHHHH

SEQ ID NO: 242 - protein, 639 aa, Artificial Sequence
  This is the amino acid sequence of bovine IL-6 polyprotein.
GPLGEDFKNDTTPGRLLLTTPEKTEALIKRMVDKISAMRKEICEKNDECESSKETLAENKLNLPKMEEKDGCFQSGFNQAICLIRTTAGLLEYQIYLDYLQNEYEGNQENVRDLRKNIRTLIQILKQKIADLITTPATNTDLLEKMQSSNEWVKNAKIILILRNLENFLQFSLRAIRMKGSGGQYIKANSKFIGITELAGSGGPLGEDFKNDTTPGRLLLTTPEKTEALIKRMVDKISAMRKEICEKNDECESSKETLAENKLNLPKMEEKDGCFQSGFNQAICLIRTTAGLLEYQIYLDYLQNEYEGNQENVRDLRKNIRTLIQILKQKIADLITTPATNTDLLEKMQSSNEWVKNAKIILILRNLENFLQFSLRAIRMKAGSGFNNFTVSFWLRVPKVSASHLESGGSGPLGEDFKNDTTPGRLLLTTPEKTEALIKRMVDKISAMRKEICEKNDECESSKETLAENKLNLPKMEEKDGCFQSGFNQAICLIRTTAGLLEYQIYLDYLQNEYEGNQENVRDLRKNIRTLIQILKQKIADLITTPATNTDLLEKMQSSNEWVKNAKIILILRNLENFLQFSLRAIRMKAGSGFNNFTVSFWLRVPKVSASHLEGSGGQYIKANSKFIGITELHHHHHH

SEQ ID NO: 243 - protein, 558 aa, Artificial Sequence
  This is the amino acid sequence of human IL-7 polyprotein.
DCDIEGKDGKQYESVLMVSIDQLLDSMKEIGSNCLNNEFNFFKRHICDANKEGMFLFRAARKLRQFLKMNSTGDFDLHLLKVSEGTTILLNCTGQVKGRKPAALGEAQPTKSLEENKSLKEQKKLNDLCFLKRLLQEIKTCWNKILMGTKEHGSGGQYIKANSKFIGITELAGSGDCDIEGKDGKQYESVLMVSIDQLLDSMKEIGSNCLNNEFNFFKRHICDANKEGMFLFRAARKLRQFLKMNSTGDFDLHLLKVSEGTTILLNCTGQVKGRKPAALGEAQPTKSLEENKSLKEQKKLNDLCFLKRLLQEIKTCWNKILMGTKEHAGSGFNNFTVSFWLRVPKVSASHLESGGSDCDIEGKDGKQYESVLMVSIDQLLDSMKEIGSNCLNNEFNFFKRHICDANKEGMFLFRAARKLRQFLKMNSTGDFDLHLLKVSEGTTILLNCTGQVKGRKPAALGEAQPTKSLEENKSLKEQKKLNDLCFLKRLLQEIKTCWNKILMGTKEHAGSGFNNFTVSFWLRVPKVSASHLEGSGGQYIKANSKFIGITELHHHHHH

SEQ ID NO: 244 - protein, 339 aa, Artificial Sequence
  This is the amino acid sequence of dog IL-8 polyprotein.
AVLSRVSSELRCQCIKTHSTPFHPKYIKELRVIDSGPHCENSEIIVKLFNGNEVCLDPKEKWVQKVVQIFLKKAEKQDPGSGGQYIKANSKFIGITELAGSGAVLSRVSSELRCQCIKTHSTPFHPKYIKELRVIDSGPHCENSEIIVKLFNGNEVCLDPKEKWVQKVVQIFLKKAEKQDPAGSGFNNFTVSFWLRVPKVSASHLESGGSAVLSRVSSELRCQCIKTHSTPFHPKYIKELRVIDSGPHCENSEIIVKLFNGNEVCLDPKEKWVQKVVQIFLKKAEKQDPAGSGFNNFTVSFWLRVPKVSASHLEGSGGQYIKANSKFIGITELHHHHHH

SEQ ID NO: 245 - protein, 339 aa, Artificial Sequence
  This is the amino acid sequence of cat IL-8 polyprotein.
AVLSRISSELRCQCIKTHSTPFNPKLIKELTVIDSGPHCENSEIIVKLVNGKEVCLDPKQKWVQKVVEIFLKKAEKQNAGSGGQYIKANSKFIGITELAGSGAVLSRISSELRCQCIKTHSTPFNPKLIKELTVIDSGPHCENSEIIVKLVNGKEVCLDPKQKWVQKVVEIFLKKAEKQNAAGSGFNNFTVSFWLRVPKVSASHLESGGSAVLSRISSELRCQCIKTHSTPFNPKLIKELTVIDSGPHCENSEIIVKLVNGKEVCLDPKQKWVQKVVEIFLKKAEKQNAAGSGFNNFTVSFWLRVPKVSASHLEGSGGQYIKANSKFIGITELHHHHHH

SEQ ID NO: 246 - protein, 339 aa, Artificial Sequence
  This is the amino acid sequence of bovine IL-8 polyprotein.
AVLSRMSTELRCQCIKTHSTPFHPKFIKELRVIESGPHCENSEIIVKLTNGNEVCLNPKEKWVQKVVQVFVKRAEKQDPGSGGQYIKANSKFIGITELAGSGAVLSRMSTELRCQCIKTHSTPFHPKFIKELRVIESGPHCENSEIIVKLTNGNEVCLNPKEKWVQKVVQVFVKRAEKQDPAGSGFNNFTVSFWLRVPKVSASHLESGGSAVLSRMSTELRCQCIKTHSTPFHPKFIKELRVIESGPHCENSEIIVKLTNGNEVCLNPKEKWVQKVVQVFVKRAEKQDPAGSGFNNFTVSFWLRVPKVSASHLEGSGGQYIKANSKFIGITELHHHHHH

SEQ ID NO: 247 - protein, 339 aa, Artificial Sequence
  This is the amino acid sequence of human IL-8 (21-99) polyprotein.
EGAVLPRSAKELRCQCIKTYSKPFHPKFIKELRVIESGPHCANTEIIVKLSDGRELCLDPKENWVQRVVEKFLKRAENSGSGGQYIKANSKFIGITELAGSGEGAVLPRSAKELRCQCIKTYSKPFHPKFIKELRVIESGPHCANTEIIVKLSDGRELCLDPKENWVQRVVEKFLKRAENSAGSGFNNFTVSFWLRVPKVSASHLESGGSEGAVLPRSAKELRCQCIKTYSKPFHPKFIKELRVIESGPHCANTEIIVKLSDGRELCLDPKENWVQRVVEKFLKRAENSAGSGFNNFTVSFWLRVPKVSASHLEGSGGQYIKANSKFIGITELHHHHHH

SEQ ID NO: 248 - protein, 333 aa, Artificial Sequence
  This is the amino acid sequence of human IL-8 (23-99) polyprotein.
AVLPRSAKELRCQCIKTYSKPFHPKFIKELRVIESGPHCANTEIIVKLSDGRELCLDPKENWVQRVVEKFLKRAENSGSGGQYIKANSKFIGITELAGSGAVLPRSAKELRCQCIKTYSKPFHPKFIKELRVIESGPHCANTEIIVKLSDGRELCLDPKENWVQRVVEKFLKRAENSAGSGFNNFTVSFWLRVPKVSASHLESGGSAVLPRSAKELRCQCIKTYSKPFHPKFIKELRVIESGPHCANTEIIVKLSDGRELCLDPKENWVQRVVEKFLKRAENSAGSGFNNFTVSFWLRVPKVSASHLEGSGGQYIKANSKFIGITELHHHHHH

SEQ ID NO: 249 - protein, 321 aa, Artificial Sequence
  This is the amino acid sequence of human IL-8 (27-99) polyprotein.
RSAKELRCQCIKTYSKPFHPKFIKELRVIESGPHCANTEIIVKLSDGRELCLDPKENWVQRVVEKFLKRAENSGSGGQYIKANSKFIGITELAGSGRSAKELRCQCIKTYSKPFHPKFIKELRVIESGPHCANTEIIVKLSDGRELCLDPKENWVQRVVEKFLKRAENSAGSGFNNFTVSFWLRVPKVSASHLESGGSRSAKELRCQCIKTYSKPFHPKFIKELRVIESGPHCANTEIIVKLSDGRELCLDPKENWVQRVVEKFLKRAENSAGSGFNNFTVSFWLRVPKVSASHLEGSGGQYIKANSKFIGITELHHHHHH

SEQ ID NO: 250 - protein, 318 aa, Artificial Sequence
  This is the amino acid sequence of human IL-8 (28-99) polyprotein.
SAKELRCQCIKTYSKPFHPKFIKELRVIESGPHCANTEIIVKLSDGRELCLDPKENWVQRVVEKFLKRAENSGSGGQYIKANSKFIGITELAGSGSAKELRCQCIKTYSKPFHPKFIKELRVIESGPHCANTEIIVKLSDGRELCLDPKENWVQRVVEKFLKRAENSAGSGFNNFTVSFWLRVPKVSASHLESGGSSAKELRCQCIKTYSKPFHPKFIKELRVIESGPHCANTEIIVKLSDGRELCLDPKENWVQRVVEKFLKRAENSAGSGFNNFTVSFWLRVPKVSASHLEGSGGQYIKANSKFIGITELHHHHHH

SEQ ID NO: 251 - protein, 315 aa, Artificial Sequence
  This is the amino acid sequence of human IL-8 (29-99) polyprotein.
AKELRCQCIKTYSKPFHPKFIKELRVIESGPHCANTEIIVKLSDGRELCLDPKENWVQRVVEKFLKRAENSGSGGQYIKANSKFIGITELAGSGAKELRCQCIKTYSKPFHPKFIKELRVIESGPHCANTEIIVKLSDGRELCLDPKENWVQRVVEKFLKRAENSAGSGFNNFTVSFWLRVPKVSASHLESGGSAKELRCQCIKTYSKPFHPKFIKELRVIESGPHCANTEIIVKLSDGRELCLDPKENWVQRVVEKFLKRAENSAGSGFNNFTVSFWLRVPKVSASHLEGSGGQYIKANSKFIGITELHHHHHH

SEQ ID NO: 252 - protein, 312 aa, Artificial Sequence
  This is the amino acid sequence of human IL-8 (30-99) polyprotein.
KELRCQCIKTYSKPFHPKFIKELRVIESGPHCANTEIIVKLSDGRELCLDPKENWVQRVVEKFLKRAENSGSGGQYIKANSKFIGITELAGSGKELRCQCIKTYSKPFHPKFIKELRVIESGPHCANTEIIVKLSDGRELCLDPKENWVQRVVEKFLKRAENSAGSGFNNFTVSFWLRVPKVSASHLESGGSKELRCQCIKTYSKPFHPKFIKELRVIESGPHCANTEIIVKLSDGRELCLDPKENWVQRVVEKFLKRAENSAGSGFNNFTVSFWLRVPKVSASHLEGSGGQYIKANSKFIGITELHHHHHH

SEQ ID NO: 253 - protein, 309 aa, Artificial Sequence
  This is the amino acid sequence of human IL-8 (31-99) polyprotein.
ELRCQCIKTYSKPFHPKFIKELRVIESGPHCANTEIIVKLSDGRELCLDPKENWVQRVVEKFLKRAENSGSGGQYIKANSKFIGITELAGSGELRCQCIKTYSKPFHPKFIKELRVIESGPHCANTEIIVKLSDGRELCLDPKENWVQRVVEKFLKRAENSAGSGFNNFTVSFWLRVPKVSASHLESGGSELRCQCIKTYSKPFHPKFIKELRVIESGPHCANTEIIVKLSDGRELCLDPKENWVQRVVEKFLKRAENSAGSGFNNFTVSFWLRVPKVSASHLEGSGGQYIKANSKFIGITELHHHHHH

SEQ ID NO: 254 - protein, 480 aa, Artificial Sequence
  This is the amino acid sequence of human IL-9 polyprotein.
QGCPTLAGILDINFLINKMQEDPASKCHCSANVTSCLCLGIPSDNCTRPCFSERLSQMTNTTMQTRYPLIFSRVKKSVEVLKNNKCPYFSCEQPCNQTTAGNALTFLKSLLEIFQKEKMRGMRGKIGSGGQYIKANSKFIGITELAGSGQGCPTLAGILDINFLINKMQEDPASKCHCSANVTSCLCLGIPSDNCTRPCFSERLSQMTNTTMQTRYPLIFSRVKKSVEVLKNNKCPYFSCEQPCNQTTAGNALTFLKSLLEIFQKEKMRGMRGKIAGSGFNNFTVSFWLRVPKVSASHLESGGSQGCPTLAGILDINFLINKMQEDPASKCHCSANVTSCLCLGIPSDNCTRPCFSERLSQMTNTTMQTRYPLIFSRVKKSVEVLKNNKCPYFSCEQPCNQTTAGNALTFLKSLLEIFQKEKMRGMRGKIAGSGFNNFTVSFWLRVPKVSASHLEGSGGQYIKANSKFIGITELHHHHHH

SEQ ID NO: 255 - protein, 588 aa, Artificial Sequence
  This is the amino acid sequence of dog IL-10 polyprotein.
SRHQSTLLEDDCTHFPASLPHMLRELRAAFGRVKIFFQMKDKLDNILLTGSLLEDFKSYLGCQALSEMIQFYLEEVMPRAENHDPDIKNHVNSLGEKLKTLRLRLRLRRCHRFLPCENKSKAVEQVKSAFSKLQEKGVYKAMSEFDIFINYIETYMTMRMKIGSGGQYIKANSKFIGITELAGSGSRHQSTLLEDDCTHFPASLPHMLRELRAAFGRVKIFFQMKDKLDNILLTGSLLEDFKSYLGCQALSEMIQFYLEEVMPRAENHDPDIKNHVNSLGEKLKTLRLRLRLRRCHRFLPCENKSKAVEQVKSAFSKLQEKGVYKAMSEFDIFINYIETYMTMRMKIAGSGFNNFTVSFWLRVPKVSASHLESGGSSRHQSTLLEDDCTHFPASLPHMLRELRAAFGRVKIFFQMKDKLDNILLTGSLLEDFKSYLGCQALSEMIQFYLEEVMPRAENHDPDIKNHVNSLGEKLKTLRLRLRLRRCHRFLPCENKSKAVEQVKSAFSKLQEKGVYKAMSEFDIFINYIETYMTMRMKIAGSGFNNFTVSFWLRVPKVSASHLEGSGGQYIKANSKFIGITELHHHHHH

SEQ ID NO: 256 - protein, 582 aa, Artificial Sequence
  This is the amino acid sequence of cat IL-10 polyprotein.
SRHQSTLSEDNCTHFSVSLPHMLRELRAAFGKVKTFFQTKDELHSILLTRSLLEDFKGYLGCQALSEMIQFYLEEVMPQAENEDPDIKQHVNSLGEKLKTLRLRLRRCHRFLPCENKSKVVEQVKSTFSKLQEKGVYKAMGEFDIFINYIEAYMTMKMKIGSGGQYIKANSKFIGITELAGSGSRHQSTLSEDNCTHFSVSLPHMLRELRAAFGKVKTFFQTKDELHSILLTRSLLEDFKGYLGCQALSEMIQFYLEEVMPQAENEDPDIKQHVNSLGEKLKTLRLRLRRCHRFLPCENKSKVVEQVKSTFSKLQEKGVYKAMGEFDIFINYIEAYMTMKMKIAGSGFNNFTVSFWLRVPKVSASHLESGGSSRHQSTLSEDNCTHFSVSLPHMLRELRAAFGKVKTFFQTKDELHSILLTRSLLEDFKGYLGCQALSEMIQFYLEEVMPQAENEDPDIKQHVNSLGEKLKTLRLRLRRCHRFLPCENKSKVVEQVKSTFSKLQEKGVYKAMGEFDIFINYIEAYMTMKMKIAGSGFNNFTVSFWLRVPKVSASHLEGSGGQYIKANSKFIGITELHHHHHH

SEQ ID NO: 257 - protein, 582 aa, Artificial Sequence
  This is the amino acid sequence of human IL-10 polyprotein.
SPGQGTQSENSCTHFPGNLPNMLRDLRDAFSRVKTFFQMKDQLDNLLLKESLLEDFKGYLGCQALSEMIQFYLEEVMPQAENQDPDIKAHVNSLGENLKTLRLRLRRCHRFLPCENKSKAVEQVKNAFNKLQEKGIYKAMSEFDIFINYIEAYMTMKIRNGSGGQYIKANSKFIGITELAGSGSPGQGTQSENSCTHFPGNLPNMLRDLRDAFSRVKTFFQMKDQLDNLLLKESLLEDFKGYLGCQALSEMIQFYLEEVMPQAENQDPDIKAHVNSLGENLKTLRLRLRRCHRFLPCENKSKAVEQVKNAFNKLQEKGIYKAMSEFDIFINYIEAYMTMKIRNAGSGFNNFTVSFWLRVPKVSASHLESGGSSPGQGTQSENSCTHFPGNLPNMLRDLRDAFSRVKTFFQMKDQLDNLLLKESLLEDFKGYLGCQALSEMIQFYLEEVMPQAENQDPDIKAHVNSLGENLKTLRLRLRRCHRFLPCENKSKAVEQVKNAFNKLQEKGIYKAMSEFDIFINYIEAYMTMKIRNAGSGFNNFTVSFWLRVPKVSASHLEGSGGQYIKANSKFIGITELHHHHHH

SEQ ID NO: 258 - protein, 636 aa, Artificial Sequence
  This is the amino acid sequence of human IL-11 polyprotein.
PGPPPGPPRVSPDPRAELDSTVLLTRSLLADTRQLAAQLRDKFPADGDHNLDSLPTLAMSAGALGALQLPGVLTRLRADLLSYLRHVQWLRRAGGSSLKTLEPELGTLQARLDRLLRRLQLLMSRLALPQPPPDPPAPPLAPPSSAWGGIRAAHAILGGLHLTLDWAVRGLLLLKTRLGSGGQYIKANSKFIGITELAGSGPGPPPGPPRVSPDPRAELDSTVLLTRSLLADTRQLAAQLRDKFPADGDHNLDSLPTLAMSAGALGALQLPGVLTRLRADLLSYLRHVQWLRRAGGSSLKTLEPELGTLQARLDRLLRRLQLLMSRLALPQPPPDPPAPPLAPPSSAWGGIRAAHAILGGLHLTLDWAVRGLLLLKTRLAGSGFNNFTVSFWLRVPKVSASHLESGGSPGPPPGPPRVSPDPRAELDSTVLLTRSLLADTRQLAAQLRDKFPADGDHNLDSLPTLAMSAGALGALQLPGVLTRLRADLLSYLRHVQWLRRAGGSSLKTLEPELGTLQARLDRLLRRLQLLMSRLALPQPPPDPPAPPLAPPSSAWGGIRAAHAILGGLHLTLDWAVRGLLLLKTRLAGSGFNNFTVSFWLRVPKVSASHLEGSGGQYIKANSKFIGITELHHHHHH

SEQ ID NO: 259 - protein, 1740 aa, Artificial Sequence
  This is the amino acid sequence of human IL-14 polyprotein.
MKNQDKKNGAAKQSNPKSSPGQPEAGPEGAQERPSQAAPAVEAEGPGSSQAPRKPEGAQARTAQSGALRDVSEELSRQLEDILSTYCVDNNQGGPGEDGAQGEPAEPEDAEKSRTYVARNGEPEPTPVVNGEKEPSKGDPNTEEIRQSDEVGDRDHRRPQEKKKAKGLGKEITLLMQTLNTLSTPEEKLAALCKKYAELLEEHRNSQKQMKLLQKKQSQLVQEKDHLRGEHSKAVLARSKLESLCRELQRHNRSLKEEGVQRAREEEEKRKEVTSHFQVTLNDIQLQMEQHNERNSKLRQENMELAERLKKLIEQYELREEHIDKVFKHKDLQQQLVDAKLQQAQEMLKEAEERHQREKDFLLKEAVESQRMCELMKQQETHLKQQLALYTEKFEEFQNTLSKSSEVFTTFKQEMEKMTKKIKKLEKETTMYRSRWESSNKALLEMAEEKTVRDKELEGLQVKIQRLEKLCRALQTERNDLNKRVQDLSAGGQGSLTDSGPERRPEGPGAQAPSSPRVTEAPCYPGAPSTEASGQTGPQEPTSARAGSGGQYIKANSKFIGITELAGSGMKNQDKKNGAAKQSNPKSSPGQPEAGPEGAQERPSQAAPAVEAEGPGSSQAPRKPEGAQARTAQSGALRDVSEELSRQLEDILSTYCVDNNQGGPGEDGAQGEPAEPEDAEKSRTYVARNGEPEPTPVVNGEKEPSKGDPNTEEIRQSDEVGDRDHRRPQEKKKAKGLGKEITLLMQTLNTLSTPEEKLAALCKKYAELLEEHRNSQKQMKLLQKKQSQLVQEKDHLRGEHSKAVLARSKLESLCRELQRHNRSLKEEGVQRAREEEEKRKEVTSHFQVTLNDIQLQMEQHNERNSKLRQENMELAERLKKLIEQYELREEHIDKVFKHKDLQQQLVDAKLQQAQEMLKEAEERHQREKDFLLKEAVESQRMCELMKQQETHLKQQLALYTEKFEEFQNTLSKSSEVFTTFKQEMEKMTKKIKKLEKETTMYRSRWESSNKALLEMAEEKTVRDKELEGLQVKIQRLEKLCRALQTERNDLNKRVQDLSAGGQGSLTDSGPERRPEGPGAQAPSSPRVTEAPCYPGAPSTEASGQTGPQEPTSARAAGSGFNNFTVSFWLRVPKVSASHLESGGSMKNQDKKNGAAKQSNPKSSPGQPEAGPEGAQERPSQAAPAVEAEGPGSSQAPRKPEGAQARTAQSGALRDVSEELSRQLEDILSTYCVDNNQGGPGEDGAQGEPAEPEDAEKSRTYVARNGEPEPTPVVNGEKEPSKGDPNTEEIRQSDEVGDRDHRRPQEKKKAKGLGKEITLLMQTLNTLSTPEEKLAALCKKYAELLEEHRNSQKQMKLLQKKQSQLVQEKDHLRGEHSKAVLARSKLESLCRELQRHNRSLKEEGVQRAREEEEKRKEVTSHFQVTLNDIQLQMEQHNERNSKLRQENMELAERLKKLIEQYELREEHIDKVFKHKDLQQQLVDAKLQQAQEMLKEAEERHQREKDFLLKEAVESQRMCELMKQQETHLKQQLALYTEKFEEFQNTLSKSSEVFTTFKQEMEKMTKKIKKLEKETTMYRSRWESSNKALLEMAEEKTVRDKELEGLQVKIQRLEKLCRALQTERNDLNKRVQDLSAGGQGSLTDSGPERRPEGPGAQAPSSPRVTEAPCYPGAPSTEASGQTGPQEPTSARAAGSGFNNFTVSFWLRVPKVSASHLEGSGGQYIKANSKFIGITELHHHHHH

SEQ ID NO: 260 - protein, 444 aa, Artificial Sequence
  This is the amino acid sequence of cat IL-15 polyprotein.
NWQDVISDLKIIDKIIQSLHIDATLYTESDVHPNCKVTAMKCFLLELHVISLESKNETIHQTVENIIILANSGLSSNRNITETGCKECEELEEKNIKEFLQSFVHIVQMFINTSGSGGQYIKANSKFIGITELAGSGNWQDVISDLKIIDKIIQSLHIDATLYTESDVHPNCKVTAMKCFLLELHVISLESKNETIHQTVENIIILANSGLSSNRNITETGCKECEELEEKNIKEFLQSFVHIVQMFINTSAGSGFNNFTVSFWLRVPKVSASHLESGGSNWQDVISDLKIIDKIIQSLHIDATLYTESDVHPNCKVTAMKCFLLELHVISLESKNETIHQTVENIIILANSGLSSNRNITETGCKECEELEEKNIKEFLQSFVHIVQMFINTSAGSGFNNFTVSFWLRVPKVSASHLEGSGGQYIKANSKFIGITELHHHHHH

SEQ ID NO: 261 - protein, 444 aa, Artificial Sequence
  This is the amino acid sequence of human IL-15 polyprotein.
NWVNVISDLKKIEDLIQSMHIDATLYTESDVHPSCKVTAMKCFLLELQVISLESGDASIHDTVENLIILANNSLSSNGNVTESGCKECEELEEKNIKEFLQSFVHIVQMFINTSGSGGQYIKANSKFIGITELAGSGNWVNVISDLKKIEDLIQSMHIDATLYTESDVHPSCKVTAMKCFLLELQVISLESGDASIHDTVENLIILANNSLSSNGNVTESGCKECEELEEKNIKEFLQSFVHIVQMFINTSAGSGFNNFTVSFWLRVPKVSASHLESGGSNWVNVISDLKKIEDLIQSMHIDATLYTESDVHPSCKVTAMKCFLLELQVISLESGDASIHDTVENLIILANNSLSSNGNVTESGCKECEELEEKNIKEFLQSFVHIVQMFINTSAGSGFNNFTVSFWLRVPKVSASHLEGSGGQYIKANSKFIGITELHHHHHH

SEQ ID NO: 262 - protein, 4098 aa, Artificial Sequence
  This is the amino acid sequence of human IL-16 (1-1332) polyprotein.
MESHSRAGKSRKSAKFRSISRSLMLCNAKTSDDGSSPDEKYPDPFEISLAQGKEGIFHSSVQLADTSEAGPSSVPDLALASEAAQLQAAGNDRGKTCRRIFFMKESSTASSREKPGKLEAQSSNFLFPKACHQRARSNSTSVNPYCTREIDFPMTKKSAAPTDRQPYSLCSNRKSLSQQLDCPAGKAAGTSRPTRSLSTAQLVQPSGGLQASVISNIVLMKGQAKGLGFSIVGGKDSIYGPIGIYVKTIFAGGAAAADGRLQEGDEILELNGESMAGLTHQDALQKFKQAKKGLLTLTVRTRLTAPPSLCSHLSPPLCRSLSSSTCITKDSSSFALESPSAPISTAKPNYRIMVEVSLQKEAGVGLGIGLCSVPYFQCISGIFVHTLSPGSVAHLDGRLRCGDEIVEISDSPVHCLTLNEVYTILSHCDPGPVPIIVSRHPDPQVSEQQLKEAVAQAVENTKFGKERHQWSLEGVKRLESSWHGRPTLEKEREKNSAPPHRRAQKVMIRSSSDSSYMSGSPGGSPGSGSAEKPSSDVDISTHSPSLPLAREPVVLSIASSRLPQESPPLPESRDSHPPLRLKKSFEILVRKPMSSKPKPPPRKYFKSDSDPQKSLEERENSSCSSGHTPPTCGQEARELLPLLLPQEDTAGRSPSASAGCPGPGIGPQTKSSTEGEPGWRRASPVTQTSPIKHPLLKRQARMDYSFDTTAEDPWVRISDCIKNLFSPIMSENHGHMPLQPNASLNEEEGTQGHPDGTPPKLDTANGTPKVYKSADSSTVKKGPPVAPKPAWFRQSLKGLRNRASDPRGLPDPALSTQPAPASREHLGSHIRASSSSSSIRQRISSFETFGSSQLPDKGAQRLSLQPSSGEAAKPLGKHEEGRFSGLLGRGAAPTLVPQQPEQVLSSGSPAASEARDPGVSESPPPGRQPNQKTLPPGPDPLLRLLSTQAEESQGPVLKMPSQRARSFPLTRSQSCETKLLDEKTSKLYSISSQVSSAVMKSLLCLPSSISCAQTPCIPKEGASPTSSSNEDSAANGSAETSALDTGFSLNLSELREYTEGLTEAKEDDDGDHSSLQSGQSVISLLSSEELKKLIEEVKVLDEATLKQLDGIHVTILHKEEGAGLGFSLAGGADLENKVITVHRVFPNGLASQEGTIQKGNEVLSINGKSLKGTTHHDALAILRQAREPRQAVIVTRKLTPEAMPDLNSSTDSAASASAASDVSVESTAEATVCTVTLEKMSAGLGFSLEGGKGSLHGDKPLTINRIFKGAASEQSETVQPGDEILQLGGTAMQGLTRFEAWNIIKALPDGPVTIVIRRKSLQSKETTAAGDSGSGGQYIKANSKFIGITELAGSGMESHSRAGKSRKSAKFRSISRSLMLCNAKTSDDGSSPDEKYPDPFEISLAQGKEGIFHSSVQLADTSEAGPSSVPDLALASEAAQLQAAGNDRGKTCRRIFFMKESSTASSREKPGKLEAQSSNFLFPKACHQRARSNSTSVNPYCTREIDFPMTKKSAAPTDRQPYSLCSNRKSLSQQLDCPAGKAAGTSRPTRSLSTAQLVQPSGGLQASVISNIVLMKGQAKGLGFSIVGGKDSIYGPIGIYVKTIFAGGAAAADGRLQEGDEILELNGESMAGLTHQDALQKFKQAKKGLLTLTVRTRLTAPPSLCSHLSPPLCRSLSSSTCITKDSSSFALESPSAPISTAKPNYRIMVEVSLQKEAGVGLGIGLCSVPYFQCISGIFVHTLSPGSVAHLDGRLRCGDEIVEISDSPVHCLTLNEVYTILSHCDPGPVPIIVSRHPDPQVSEQQLKEAVAQAVENTKFGKERHQWSLEGVKRLESSWHGRPTLEKEREKNSAPPHRRAQKVMIRSSSDSSYMSGSPGGSPGSGSAEKPSSDVDISTHSPSLPLAREPVVLSIASSRLPQESPPLPESRDSHPPLRLKKSFEILVRKPMSSKPKPPPRKYFKSDSDPQKSLEERENSSCSSGHTPPTCGQEARELLPLLLPQEDTAGRSPSASAGCPGPGIGPQTKSSTEGEPGWRRASPVTQTSPIKHPLLKRQARMDYSFDTTAEDPWVRISDCIKNLFSPIMSENHGHMPLQPNASLNEEEGTQGHPDGTPPKLDTANGTPKVYKSADSSTVKKGPPVAPKPAWFRQSLKGLRNRASDPRGLPDPALSTQPAPASREHLGSHIRASSSSSSIRQRISSFETFGSSQLPDKGAQRLSLQPSSGEAAKPLGKHEEGRFSGLLGRGAAPTLVPQQPEQVLSSGSPAASEARDPGVSESPPPGRQPNQKTLPPGPDPLLRLLSTQAEESQGPVLKMPSQRARSFPLTRSQSCETKLLDEKTSKLYSISSQVSSAVMKSLLCLPSSISCAQTPCIPKEGASPTSSSNEDSAANGSAETSALDTGFSLNLSELREYTEGLTEAKEDDDGDHSSLQSGQSVISLLSSEELKKLIEEVKVLDEATLKQLDGIHVTILHKEEGAGLGFSLAGGADLENKVITVHRVFPNGLASQEGTIQKGNEVLSINGKSLKGTTHHDALAILRQAREPRQAVIVTRKLTPEAMPDLNSSTDSAASASAASDVSVESTAEATVCTVTLEKMSAGLGFSLEGGKGSLHGDKPLTINRIFKGAASEQSETVQPGDEILQLGGTAMQGLTRFEAWNIIKALPDGPVTIVIRRKSLQSKETTAAGDSAGSGFNNFTVSFWLRVPKVSASHLESGGSMESHSRAGKSRKSAKFRSISRSLMLCNAKTSDDGSSPDEKYPDPFEISLAQGKEGIFHSSVQLADTSEAGPSSVPDLALASEAAQLQAAGNDRGKTCRRIFFMKESSTASSREKPGKLEAQSSNFLFPKACHQRARSNSTSVNPYCTREIDFPMTKKSAAPTDRQPYSLCSNRKSLSQQLDCPAGKAAGTSRPTRSLSTAQLVQPSGGLQASVISNIVLMKGQAKGLGFSIVGGKDSIYGPIGIYVKTIFAGGAAAADGRLQEGDEILELNGESMAGLTHQDALQKFKQAKKGLLTLTVRTRLTAPPSLCSHLSPPLCRSLSSSTCITKDSSSFALESPSAPISTAKPNYRIMVEVSLQKEAGVGLGIGLCSVPYFQCISGIFVHTLSPGSVAHLDGRLRCGDEIVEISDSPVHCLTLNEVYTILSHCDPGPVPIIVSRHPDPQVSEQQLKEAVAQAVENTKFGKERHQWSLEGVKRLESSWHGRPTLEKEREKNSAPPHRRAQKVMIRSSSDSSYMSGSPGGSPGSGSAEKPSSDVDISTHSPSLPLAREPVVLSIASSRLPQESPPLPESRDSHPPLRLKKSFEILVRKPMSSKPKPPPRKYFKSDSDPQKSLEERENSSCSSGHTPPTCGQEARELLPLLLPQEDTAGRSPSASAGCPGPGIGPQTKSSTEGEPGWRRASPVTQTSPIKHPLLKRQARMDYSFDTTAEDPWVRISDCIKNLFSPIMSENHGHMPLQPNASLNEEEGTQGHPDGTPPKLDTANGTPKVYKSADSSTVKKGPPVAPKPAWFRQSLKGLRNRASDPRGLPDPALSTQPAPASREHLGSHIRASSSSSSIRQRISSFETFGSSQLPDKGAQRLSLQPSSGEAAKPLGKHEEGRFSGLLGRGAAPTLVPQQPEQVLSSGSPAASEARDPGVSESPPPGRQPNQKTLPPGPDPLLRLLSTQAEESQGPVLKMPSQRARSFPLTRSQSCETKLLDEKTSKLYSISSQVSSAVMKSLLCLPSSISCAQTPCIPKEGASPTSSSNEDSAANGSAETSALDTGFSLNLSELREYTEGLTEAKEDDDGDHSSLQSGQSVISLLSSEELKKLIEEVKVLDEATLKQLDGIHVTILHKEEGAGLGFSLAGGADLENKVITVHRVFPNGLASQEGTIQKGNEVLSINGKSLKGTTHHDALAILRQAREPRQAVIVTRKLTPEAMPDLNSSTDSAASASAASDVSVESTAEATVCTVTLEKMSAGLGFSLEGGKGSLHGDKPLTINRIFKGAASEQSETVQPGDEILQLGGTAMQGLTRFEAWNIIKALPDGPVTIVIRRKSLQSKETTAAGDSAGSGFNNFTVSFWLRVPKVSASHLEGSGGQYIKANSKFIGITELHHHHHH

SEQ ID NO: 263 - protein, 465 aa, Artificial Sequence
  This is the amino acid sequence of human IL-16 (1212-1332) polyprotein.
SAASASAASDVSVESTAEATVCTVTLEKMSAGLGFSLEGGKGSLHGDKPLTINRIFKGAASEQSETVQPGDEILQLGGTAMQGLTRFEAWNIIKALPDGPVTIVIRRKSLQSKETTAAGDSGSGGQYIKANSKFIGITELAGSGSAASASAASDVSVESTAEATVCTVTLEKMSAGLGFSLEGGKGSLHGDKPLTINRIFKGAASEQSETVQPGDEILQLGGTAMQGLTRFEAWNIIKALPDGPVTIVIRRKSLQSKETTAAGDSAGSGFNNFTVSFWLRVPKVSASHLESGGSSAASASAASDVSVESTAEATVCTVTLEKMSAGLGFSLEGGKGSLHGDKPLTINRIFKGAASEQSETVQPGDEILQLGGTAMQGLTRFEAWNIIKALPDGPVTIVIRRKSLQSKETTAAGDSAGSGFNNFTVSFWLRVPKVSASHLEGSGGQYIKANSKFIGITELHHHHHH

SEQ ID NO: 264 - protein, 483 aa, Artificial Sequence
  This is the amino acid sequence of dog IL-17A polyprotein.
FPQNPGCRNTEDKNFPQHVKVNLNILNRNTNSRRPSDYYNRSTSPWNLHRNEDPERYPSVIWEAKCRHLGCVNNEGNINYHMNSVPIQQEILVLRRESQHCPHSFRLEKMLVAVGCTCVTPIVRHVAGSGGQYIKANSKFIGITELAGSGFPQNPGCRNTEDKNFPQHVKVNLNILNRNTNSRRPSDYYNRSTSPWNLHRNEDPERYPSVIWEAKCRHLGCVNNEGNINYHMNSVPIQQEILVLRRESQHCPHSFRLEKMLVAVGCTCVTPIVRHVAAGSGFNNFTVSFWLRVPKVSASHLESGGSFPQNPGCRNTEDKNFPQHVKVNLNILNRNTNSRRPSDYYNRSTSPWNLHRNEDPERYPSVIWEAKCRHLGCVNNEGNINYHMNSVPIQQEILVLRRESQHCPHSFRLEKMLVAVGCTCVTPIVRHVAAGSGFNNFTVSFWLRVPKVSASHLEGSGGQYIKANSKFIGITELHHHHHH

SEQ ID NO: 265 - protein, 483 aa, Artificial Sequence
  This is the amino acid sequence of cat IL-17A polyprotein.
FPQNPGCPTTEDKNFPQHVKVNVNILNGNKSSRRPLDYYRRSTSPWSLHRNEDPERYPSVIWEAKCLHWGCVNTEGKEDHHMNSVPIQQEILVLRRESRHCPHSFRLEKMLVTVGCTCVTPIVRHVVGSGGQYIKANSKFIGITELAGSGFPQNPGCPTTEDKNFPQHVKVNVNILNGNKSSRRPLDYYRRSTSPWSLHRNEDPERYPSVIWEAKCLHWGCVNTEGKEDHHMNSVPIQQEILVLRRESRHCPHSFRLEKMLVTVGCTCVTPIVRHVVAGSGFNNFTVSFWLRVPKVSASHLESGGSFPQNPGCPTTEDKNFPQHVKVNVNILNGNKSSRRPLDYYRRSTSPWSLHRNEDPERYPSVIWEAKCLHWGCVNTEGKEDHHMNSVPIQQEILVLRRESRHCPHSFRLEKMLVTVGCTCVTPIVRHVVAGSGFNNFTVSFWLRVPKVSASHLEGSGGQYIKANSKFIGITELHHHHHH

SEQ ID NO: 266 - protein, 576 aa, Artificial Sequence
  This is the amino acid sequence of dog IL-17B polyprotein.
RNPKGKRKGPGRPGTLAPGPHQVPLDLVSQAKPYARMEEYERNLSEMVAQLRNSSEPARRKCEVNLQLWLSNKRSLSPWGYSINHDPSRVPADLPEARCLCLGCVNPFTMQEDRSMVSVPVFSQVPVRRRLCPLPPRTGPCRQRAVMETIAVGCTCIFGSGGQYIKANSKFIGITELAGSGRNPKGKRKGPGRPGTLAPGPHQVPLDLVSQAKPYARMEEYERNLSEMVAQLRNSSEPARRKCEVNLQLWLSNKRSLSPWGYSINHDPSRVPADLPEARCLCLGCVNPFTMQEDRSMVSVPVFSQVPVRRRLCPLPPRTGPCRQRAVMETIAVGCTCIFAGSGFNNFTVSFWLRVPKVSASHLESGGSRNPKGKRKGPGRPGTLAPGPHQVPLDLVSQAKPYARMEEYERNLSEMVAQLRNSSEPARRKCEVNLQLWLSNKRSLSPWGYSINHDPSRVPADLPEARCLCLGCVNPFTMQEDRSMVSVPVFSQVPVRRRLCPLPPRTGPCRQRAVMETIAVGCTCIFAGSGFNNFTVSFWLRVPKVSASHLEGSGGQYIKANSKFIGITELHHHHHH

SEQ ID NO: 267 - protein, 576 aa, Artificial Sequence
  This is the amino acid sequence of cat IL-17B polyprotein.
RNPKGKRKGPGRPGTLASGPHQVPLDLVSQAKPYARMEEYERNLGEMVAQLRNSSEPARRKCEVNLQLWLSNKRSLSPWGYSINHDPSRIPADLPEARCLCLGCVNPFTMQEDRSMVSVPVFSQVPVRRRLCPLPPRTGPCRQRAVMETIAVGCTCIFGSGGQYIKANSKFIGITELAGSGRNPKGKRKGPGRPGTLASGPHQVPLDLVSQAKPYARMEEYERNLGEMVAQLRNSSEPARRKCEVNLQLWLSNKRSLSPWGYSINHDPSRIPADLPEARCLCLGCVNPFTMQEDRSMVSVPVFSQVPVRRRLCPLPPRTGPCRQRAVMETIAVGCTCIFAGSGFNNFTVSFWLRVPKVSASHLESGGSRNPKGKRKGPGRPGTLASGPHQVPLDLVSQAKPYARMEEYERNLGEMVAQLRNSSEPARRKCEVNLQLWLSNKRSLSPWGYSINHDPSRIPADLPEARCLCLGCVNPFTMQEDRSMVSVPVFSQVPVRRRLCPLPPRTGPCRQRAVMETIAVGCTCIFAGSGFNNFTVSFWLRVPKVSASHLEGSGGQYIKANSKFIGITELHHHHHH

SEQ ID NO: 268 - protein, 582 aa, Artificial Sequence
  This is the amino acid sequence of human IL-17B polyprotein.
QPRSPKSKRKGQGRPGPLAPGPHQVPLDLVSRMKPYARMEEYERNIEEMVAQLRNSSELAQRKCEVNLQLWMSNKRSLSPWGYSINHDPSRIPVDLPEARCLCLGCVNPFTMQEDRSMVSVPVFSQVPVRRRLCPPPPRTGPCRQRAVMETIAVGCTCIFGSGGQYIKANSKFIGITELAGSGQPRSPKSKRKGQGRPGPLAPGPHQVPLDLVSRMKPYARMEEYERNIEEMVAQLRNSSELAQRKCEVNLQLWMSNKRSLSPWGYSINHDPSRIPVDLPEARCLCLGCVNPFTMQEDRSMVSVPVFSQVPVRRRLCPPPPRTGPCRQRAVMETIAVGCTCIFAGSGFNNFTVSFWLRVPKVSASHLESGGSQPRSPKSKRKGQGRPGPLAPGPHQVPLDLVSRMKPYARMEEYERNIEEMVAQLRNSSELAQRKCEVNLQLWMSNKRSLSPWGYSINHDPSRIPVDLPEARCLCLGCVNPFTMQEDRSMVSVPVFSQVPVRRRLCPPPPRTGPCRQRAVMETIAVGCTCIFAGSGFNNFTVSFWLRVPKVSASHLEGSGGQYIKANSKFIGITELHHHHHH

SEQ ID NO: 269 - protein, 639 aa, Artificial Sequence
  This is the amino acid sequence of dog IL-17C polyprotein.
RHGPQLWRGLHTHGTPRCYSAEELPRGQAPPHLLARAAKWEQALPVALVSSLEAGGRGREQDGPPAGAQCPVLQPEEVLEADIHQRSISPWRYRVDTDESRYPQKLAFAECLCRGCISARTGRETAALNSVPLLQSLLVLRRRPCSRDTTGLPTPGAFSFHAEFIRVPIGCTCVLPRSTGSGGQYIKANSKFIGITELAGSGRHGPQLWRGLHTHGTPRCYSAEELPRGQAPPHLLARAAKWEQALPVALVSSLEAGGRGREQDGPPAGAQCPVLQPEEVLEADIHQRSISPWRYRVDTDESRYPQKLAFAECLCRGCISARTGRETAALNSVPLLQSLLVLRRRPCSRDTTGLPTPGAFSFHAEFIRVPIGCTCVLPRSTAGSGFNNFTVSFWLRVPKVSASHLESGGSRHGPQLWRGLHTHGTPRCYSAEELPRGQAPPHLLARAAKWEQALPVALVSSLEAGGRGREQDGPPAGAQCPVLQPEEVLEADIHQRSISPWRYRVDTDESRYPQKLAFAECLCRGCISARTGRETAALNSVPLLQSLLVLRRRPCSRDTTGLPTPGAFSFHAEFIRVPIGCTCVLPRSTAGSGFNNFTVSFWLRVPKVSASHLEGSGGQYIKANSKFIGITELHHHHHH

SEQ ID NO: 270 - protein, 642 aa, Artificial Sequence
  This is the amino acid sequence of cat IL-17C polyprotein.
RHGPQLWGGPHAHGTPRCYSAEELPLGQPPPHLLARAAKWEQALPVALVSSLEAGGRRRRHDGPPAGTQCPVLRPEDVLEAGIHQRSISPWRYRVDTDESRYPQKLAFAQCLCRGCVSARTGRETAALNSVPLLQSLLVLRRQPCSREATGLPTPGAFSFHAEFIRVPVGCTCVLPRSARGSGGQYIKANSKFIGITELAGSGRHGPQLWGGPHAHGTPRCYSAEELPLGQPPPHLLARAAKWEQALPVALVSSLEAGGRRRRHDGPPAGTQCPVLRPEDVLEAGIHQRSISPWRYRVDTDESRYPQKLAFAQCLCRGCVSARTGRETAALNSVPLLQSLLVLRRQPCSREATGLPTPGAFSFHAEFIRVPVGCTCVLPRSARAGSGFNNFTVSFWLRVPKVSASHLESGGSRHGPQLWGGPHAHGTPRCYSAEELPLGQPPPHLLARAAKWEQALPVALVSSLEAGGRRRRHDGPPAGTQCPVLRPEDVLEAGIHQRSISPWRYRVDTDESRYPQKLAFAQCLCRGCVSARTGRETAALNSVPLLQSLLVLRRQPCSREATGLPTPGAFSFHAEFIRVPVGCTCVLPRSARAGSGFNNFTVSFWLRVPKVSASHLEGSGGQYIKANSKFIGITELHHHHHH

SEQ ID NO: 271 - protein, 639 aa, Artificial Sequence
  This is the amino acid sequence of human IL-17C polyprotein.
HHDPSLRGHPHSHGTPHCYSAEELPLGQAPPHLLARGAKWGQALPVALVSSLEAASHRGRHERPSATTQCPVLRPEEVLEADTHQRSISPWRYRVDTDEDRYPQKLAFAECLCRGCIDARTGRETAALNSVRLLQSLLVLRRRPCSRDGSGLPTPGAFAFHTEFIHVPVGCTCVLPRSVGSGGQYIKANSKFIGITELAGSGHHDPSLRGHPHSHGTPHCYSAEELPLGQAPPHLLARGAKWGQALPVALVSSLEAASHRGRHERPSATTQCPVLRPEEVLEADTHQRSISPWRYRVDTDEDRYPQKLAFAECLCRGCIDARTGRETAALNSVRLLQSLLVLRRRPCSRDGSGLPTPGAFAFHTEFIHVPVGCTCVLPRSVAGSGFNNFTVSFWLRVPKVSASHLESGGSHHDPSLRGHPHSHGTPHCYSAEELPLGQAPPHLLARGAKWGQALPVALVSSLEAASHRGRHERPSATTQCPVLRPEEVLEADTHQRSISPWRYRVDTDEDRYPQKLAFAECLCRGCIDARTGRETAALNSVRLLQSLLVLRRRPCSRDGSGLPTPGAFAFHTEFIHVPVGCTCVLPRSVAGSGFNNFTVSFWLRVPKVSASHLEGSGGQYIKANSKFIGITELHHHHHH

SEQ ID NO: 272 - protein, 657 aa, Artificial Sequence
  This is the amino acid sequence of cat IL-17D polyprotein.
ALRASRRPARPRGCAERPEELLEQLYGRLAAGVLGAFHHTLQLGPREQARNASCPAGGRPGDRRFRPPTNLRSVSPWAYRISYDPARYPKYLPEAYCLCRGCLTGLFGEEDLRFRSAPVYMPTVILRRTSACAGGRWVYTEEYVTVPVGCTCVPEQEKEADAVNSSMDKQGARLLLGPGDKPGRPGSGGQYIKANSKFIGITELAGSGALRASRRPARPRGCAERPEELLEQLYGRLAAGVLGAFHHTLQLGPREQARNASCPAGGRPGDRRFRPPTNLRSVSPWAYRISYDPARYPKYLPEAYCLCRGCLTGLFGEEDLRFRSAPVYMPTVILRRTSACAGGRWVYTEEYVTVPVGCTCVPEQEKEADAVNSSMDKQGARLLLGPGDKPGRPAGSGFNNFTVSFWLRVPKVSASHLESGGSALRASRRPARPRGCAERPEELLEQLYGRLAAGVLGAFHHTLQLGPREQARNASCPAGGRPGDRRFRPPTNLRSVSPWAYRISYDPARYPKYLPEAYCLCRGCLTGLFGEEDLRFRSAPVYMPTVILRRTSACAGGRWVYTEEYVTVPVGCTCVPEQEKEADAVNSSMDKQGARLLLGPGDKPGRPAGSGFNNFTVSFWLRVPKVSASHLEGSGGQYIKANSKFIGITELHHHHHH

SEQ ID NO: 273 - protein, 663 aa, Artificial Sequence
  This is the amino acid sequence of human IL-17D polyprotein.
AGAPRAGRRPARPRGCADRPEELLEQLYGRLAAGVLSAFHHTLQLGPREQARNASCPAGGRPADRRFRPPTNLRSVSPWAYRISYDPARYPRYLPEAYCLCRGCLTGLFGEEDVRFRSAPVYMPTVVLRRTPACAGGRSVYTEAYVTIPVGCTCVPEPEKDADSINSSIDKQGAKLLLGPNDAPAGPGSGGQYIKANSKFIGITELAGSGAGAPRAGRRPARPRGCADRPEELLEQLYGRLAAGVLSAFHHTLQLGPREQARNASCPAGGRPADRRFRPPTNLRSVSPWAYRISYDPARYPRYLPEAYCLCRGCLTGLFGEEDVRFRSAPVYMPTVVLRRTPACAGGRSVYTEAYVTIPVGCTCVPEPEKDADSINSSIDKQGAKLLLGPNDAPAGPAGSGFNNFTVSFWLRVPKVSASHLESGGSAGAPRAGRRPARPRGCADRPEELLEQLYGRLAAGVLSAFHHTLQLGPREQARNASCPAGGRPADRRFRPPTNLRSVSPWAYRISYDPARYPRYLPEAYCLCRGCLTGLFGEEDVRFRSAPVYMPTVVLRRTPACAGGRSVYTEAYVTIPVGCTCVPEPEKDADSINSSIDKQGAKLLLGPNDAPAGPAGSGFNNFTVSFWLRVPKVSASHLEGSGGQYIKANSKFIGITELHHHHHH

SEQ ID NO: 274 - protein, 489 aa, Artificial Sequence
  This is the amino acid sequence of dog IL-17F polyprotein.
RKHLKAGETALCPPLEDNSVRVDIRILRQNRGISISNDFQNRSSSPWDYNITRDPHRFPSEIAEAQCRHSGCINAEGQEDSSMNSVPIQQEFLVLRREPQGCSRSFRLEKVLVTVGCTCVTPIVRYVRAGSGGQYIKANSKFIGITELAGSGRKHLKAGETALCPPLEDNSVRVDIRILRQNRGISISNDFQNRSSSPWDYNITRDPHRFPSEIAEAQCRHSGCINAEGQEDSSMNSVPIQQEFLVLRREPQGCSRSFRLEKVLVTVGCTCVTPIVRYVRAAGSGFNNFTVSFWLRVPKVSASHLESGGSRKHLKAGETALCPPLEDNSVRVDIRILRQNRGISISNDFQNRSSSPWDYNITRDPHRFPSEIAEAQCRHSGCINAEGQEDSSMNSVPIQQEFLVLRREPQGCSRSFRLEKVLVTVGCTCVTPIVRYVRAAGSGFNNFTVSFWLRVPKVSASHLEGSGGQYIKANSKFIGITELHHHHHH

SEQ ID NO: 275 - protein, 492 aa, Artificial Sequence
  This is the amino acid sequence of cat IL-17F polyprotein.
RKNPKAGDTALCPPLEDNSVRVDIRILRQNQGGISISNDFQNRSSSPWDYNVTRDPNRFPSEIVEAQCRHSGCINAEGQEDSSMNSVPIQQEFLVLRREPQGCSRTFRLEKVRVTVGCTCVTPIVRYVRAGSGGQYIKANSKFIGITELAGSGRKNPKAGDTALCPPLEDNSVRVDIRILRQNQGGISISNDFQNRSSSPWDYNVTRDPNRFPSEIVEAQCRHSGCINAEGQEDSSMNSVPIQQEFLVLRREPQGCSRTFRLEKVRVTVGCTCVTPIVRYVRAAGSGFNNFTVSFWLRVPKVSASHLESGGSRKNPKAGDTALCPPLEDNSVRVDIRILRQNQGGISISNDFQNRSSSPWDYNVTRDPNRFPSEIVEAQCRHSGCINAEGQEDSSMNSVPIQQEFLVLRREPQGCSRTFRLEKVRVTVGCTCVTPIVRYVRAAGSGFNNFTVSFWLRVPKVSASHLEGSGGQYIKANSKFIGITELHHHHHH

SEQ ID NO: 276 - protein, 501 aa, Artificial Sequence
  This is the amino acid sequence of human IL-17F polyprotein.
RKIPKVGHTFFQKPESCPPVPGGSMKLDIGIINENQRVSMSRNIESRSTSPWNYTVTWDPNRYPSEVVQAQCRNLGCINAQGKEDISMNSVPIQQETLVVRRKHQGCSVSFQLEKVLVTVGCTCVTPVIHHVQGSGGQYIKANSKFIGITELAGSGRKIPKVGHTFFQKPESCPPVPGGSMKLDIGIINENQRVSMSRNIESRSTSPWNYTVTWDPNRYPSEVVQAQCRNLGCINAQGKEDISMNSVPIQQETLVVRRKHQGCSVSFQLEKVLVTVGCTCVTPVIHHVQAGSGFNNFTVSFWLRVPKVSASHLESGGSRKIPKVGHTFFQKPESCPPVPGGSMKLDIGIINENQRVSMSRNIESRSTSPWNYTVTWDPNRYPSEVVQAQCRNLGCINAQGKEDISMNSVPIQQETLVVRRKHQGCSVSFQLEKVLVTVGCTCVTPVIHHVQAGSGFNNFTVSFWLRVPKVSASHLEGSGGQYIKANSKFIGITELHHHHHH

SEQ ID NO: 277 - protein, 573 aa, Artificial Sequence
  This is the amino acid sequence of dog IL-18 polyprotein.
YFGKLEPKLSIIRNLNDQVLFVNEGNQPVFEDMPDSDCTDNAPHTIFIIYMYKDSLTRGLAVTISVKYKTMSTLSCKNKTISFQKMSPPDSINDEGNDIIFFQRSVPGHDDKIQFESSLYKGHFLACKKENDLFKLILKDKDENGDKSIMFTVQNKSGSGGQYIKANSKFIGITELAGSGYFGKLEPKLSIIRNLNDQVLFVNEGNQPVFEDMPDSDCTDNAPHTIFIIYMYKDSLTRGLAVTISVKYKTMSTLSCKNKTISFQKMSPPDSINDEGNDIIFFQRSVPGHDDKIQFESSLYKGHFLACKKENDLFKLILKDKDENGDKSIMFTVQNKSAGSGFNNFTVSFWLRVPKVSASHLESGGSYFGKLEPKLSIIRNLNDQVLFVNEGNQPVFEDMPDSDCTDNAPHTIFIIYMYKDSLTRGLAVTISVKYKTMSTLSCKNKTISFQKMSPPDSINDEGNDIIFFQRSVPGHDDKIQFESSLYKGHFLACKKENDLFKLILKDKDENGDKSIMFTVQNKSAGSGFNNFTVSFWLRVPKVSASHLEGSGGQYIKANSKFIGITELHHHHHH

SEQ ID NO: 278 - protein, 573 aa, Artificial Sequence
  This is the amino acid sequence of cat IL-18 polyprotein.
YFGKLEHKLSILRNLNDQVLFINQGDQPVFEDMPDSDCTDNAPRTEFIIYMYKDSLTRGLAVTISVNYKTMSTLSCENKIISFKEMSPPESINDEGNDIIFFQRSVPGHDDKIQFESSLYKGYFLACEKEKDLFKLILKKKDENGDKSIMFTVQNKNGSGGQYIKANSKFIGITELAGSGYFGKLEHKLSILRNLNDQVLFINQGDQPVFEDMPDSDCTDNAPRTEFIIYMYKDSLTRGLAVTISVNYKTMSTLSCENKIISFKEMSPPESINDEGNDIIFFQRSVPGHDDKIQFESSLYKGYFLACEKEKDLFKLILKKKDENGDKSIMFTVQNKNAGSGFNNFTVSFWLRVPKVSASHLESGGSYFGKLEHKLSILRNLNDQVLFINQGDQPVFEDMPDSDCTDNAPRTEFIIYMYKDSLTRGLAVTISVNYKTMSTLSCENKIISFKEMSPPESINDEGNDIIFFQRSVPGHDDKIQFESSLYKGYFLACEKEKDLFKLILKKKDENGDKSIMFTVQNKNAGSGFNNFTVSFWLRVPKVSASHLEGSGGQYIKANSKFIGITELHHHHHH

SEQ ID NO: 279 - protein, 573 aa, Artificial Sequence
  This is the amino acid sequence of human IL-18 polyprotein.
YFGKLESKLSVIRNLNDQVLFIDQGNRPLFEDMTDSDCRDNAPRTIFIISMYKDSQPRGMAVTISVKCEKISTLSCENKIISFKEMNPPDNIKDTKSDIIFFQRSVPGHDNKMQFESSSYEGYFLACEKERDLFKLILKKEDELGDRSIMFTVQNEDGSGGQYIKANSKFIGITELAGSGYFGKLESKLSVIRNLNDQVLFIDQGNRPLFEDMTDSDCRDNAPRTIFIISMYKDSQPRGMAVTISVKCEKISTLSCENKIISFKEMNPPDNIKDTKSDIIFFQRSVPGHDNKMQFESSSYEGYFLACEKERDLFKLILKKEDELGDRSIMFTVQNEDAGSGFNNFTVSFWLRVPKVSASHLESGGSYFGKLESKLSVIRNLNDQVLFIDQGNRPLFEDMTDSDCRDNAPRTIFIISMYKDSQPRGMAVTISVKCEKISTLSCENKIISFKEMNPPDNIKDTKSDIIFFQRSVPGHDNKMQFESSSYEGYFLACEKERDLFKLILKKEDELGDRSIMFTVQNEDAGSGFNNFTVSFWLRVPKVSASHLEGSGGQYIKANSKFIGITELHHHHHH

SEQ ID NO: 280 - protein, 561 aa, Artificial Sequence
  This is the amino acid sequence of human IL-19 polyprotein.
LRRCLISTDMHHIEESFQEIKRAIQAKDTFPNVTILSTLETLQIIKPLDVCCVTKNLLAFYVDRVFKDHQEPNPKILRKISSIANSFLYMQKTLRQCQEQRQCHCRQEATNATRVIHDNYDQLEVHAAAIKSLGELDVFLAWINKNHEVMFSAGSGGQYIKANSKFIGITELAGSGLRRCLISTDMHHIEESFQEIKRAIQAKDTFPNVTILSTLETLQIIKPLDVCCVTKNLLAFYVDRVFKDHQEPNPKILRKISSIANSFLYMQKTLRQCQEQRQCHCRQEATNATRVIHDNYDQLEVHAAAIKSLGELDVFLAWINKNHEVMFSAAGSGFNNFTVSFWLRVPKVSASHLESGGSLRRCLISTDMHHIEESFQEIKRAIQAKDTFPNVTILSTLETLQIIKPLDVCCVTKNLLAFYVDRVFKDHQEPNPKILRKISSIANSFLYMQKTLRQCQEQRQCHCRQEATNATRVIHDNYDQLEVHAAAIKSLGELDVFLAWINKNHEVMFSAAGSGFNNFTVSFWLRVPKVSASHLEGSGGQYIKANSKFIGITELHHHHHH

SEQ ID NO: 281 - protein, 558 aa, Artificial Sequence
  This is the amino acid sequence of human IL-20 polyprotein.
LKTLNLGSCVIATNLQEIRNGFSEIRGSVQAKDGNIDIRILRRTESLQDTKPANRCCLLRHLLRLYLDRVFKNYQTPDHYTLRKISSLANSFLTIKKDLRLCHAHMTCHCGEEAMKKYSQILSHFEKLEPQAAVVKALGELDILLQWMEETEGSGGQYIKANSKFIGITELAGSGLKTLNLGSCVIATNLQEIRNGFSEIRGSVQAKDGNIDIRILRRTESLQDTKPANRCCLLRHLLRLYLDRVFKNYQTPDHYTLRKISSLANSFLTIKKDLRLCHAHMTCHCGEEAMKKYSQILSHFEKLEPQAAVVKALGELDILLQWMEETEAGSGFNNFTVSFWLRVPKVSASHLESGGSLKTLNLGSCVIATNLQEIRNGFSEIRGSVQAKDGNIDIRILRRTESLQDTKPANRCCLLRHLLRLYLDRVFKNYQTPDHYTLRKISSLANSFLTIKKDLRLCHAHMTCHCGEEAMKKYSQILSHFEKLEPQAAVVKALGELDILLQWMEETEAGSGFNNFTVSFWLRVPKVSASHLEGSGGQYIKANSKFIGITELHHHHHH

SEQ ID NO: 282 - protein, 489 aa, Artificial Sequence
  This is the amino acid sequence of dog IL-21 polyprotein.
HKSSFQEQDLLLIRMRQLIDIVDQLKNYVNDLDPESLPAPEDVKRHCERSAFSCFQKVQLKAANTGGNEQIINVLTKQLKRKLPPTNAGRRQKHRPACPSCDSYEKAPPKEFLERLKSLIQKMIHQHLSGSGGQYIKANSKFIGITELAGSGHKSSFQEQDLLLIRMRQLIDIVDQLKNYVNDLDPESLPAPEDVKRHCERSAFSCFQKVQLKAANTGGNEQIINVLTKQLKRKLPPTNAGRRQKHRPACPSCDSYEKAPPKEFLERLKSLIQKMIHQHLSAGSGFNNFTVSFWLRVPKVSASHLESGGSHKSSFQEQDLLLIRMRQLIDIVDQLKNYVNDLDPESLPAPEDVKRHCERSAFSCFQKVQLKAANTGGNEQIINVLTKQLKRKLPPTNAGRRQKHRPACPSCDSYEKAPPKEFLERLKSLIQKMIHQHLSAGSGFNNFTVSFWLRVPKVSASHLEGSGGQYIKANSKFIGITELHHHHHH

SEQ ID NO: 283 - protein, 516 aa, Artificial Sequence
  This is the amino acid sequence of human IL-21 polyprotein.
HKSSSQGQDRHMIRMRQLIDIVDQLKNYVNDLVPEFLPAPEDVETNCEWSAFSCFQKAQLKSANTGNNERIINVSIKKLKRKPPSTNAGRRQKHRLTCPSCDSYEKKPPKEFLERFKSLLQKMIHQHLSSRTHGSEDSGSGGQYIKANSKFIGITELAGSGHKSSSQGQDRHMIRMRQLIDIVDQLKNYVNDLVPEFLPAPEDVETNCEWSAFSCFQKAQLKSANTGNNERIINVSIKKLKRKPPSTNAGRRQKHRLTCPSCDSYEKKPPKEFLERFKSLLQKMIHQHLSSRTHGSEDSAGSGFNNFTVSFWLRVPKVSASHLESGGSHKSSSQGQDRHMIRMRQLIDIVDQLKNYVNDLVPEFLPAPEDVETNCEWSAFSCFQKAQLKSANTGNNERIINVSIKKLKRKPPSTNAGRRQKHRLTCPSCDSYEKKPPKEFLERFKSLLQKMIHQHLSSRTHGSEDSAGSGFNNFTVSFWLRVPKVSASHLEGSGGQYIKANSKFIGITELHHHHHH

SEQ ID NO: 284 - protein, 540 aa, Artificial Sequence
  This is the amino acid sequence of dog IL-22 polyprotein.
LPISSHCRLDKSNFQQPYITNRTFMLAKEASLADNNTDVRLIGEKLFHGVNMGERCYLMKEVLNFTLEEVLLPQSDRFQPYMQEVVPFLARLSNKLSQCHIENDDQHIQRNVQKLKDTVQKLGENGEIKAIGELDLLFMALRNACVGSGGQYIKANSKFIGITELAGSGLPISSHCRLDKSNFQQPYITNRTFMLAKEASLADNNTDVRLIGEKLFHGVNMGERCYLMKEVLNFTLEEVLLPQSDRFQPYMQEVVPFLARLSNKLSQCHIENDDQHIQRNVQKLKDTVQKLGENGEIKAIGELDLLFMALRNACVAGSGFNNFTVSFWLRVPKVSASHLESGGSLPISSHCRLDKSNFQQPYITNRTFMLAKEASLADNNTDVRLIGEKLFHGVNMGERCYLMKEVLNFTLEEVLLPQSDRFQPYMQEVVPFLARLSNKLSQCHIENDDQHIQRNVQKLKDTVQKLGENGEIKAIGELDLLFMALRNACVAGSGFNNFTVSFWLRVPKVSASHLEGSGGQYIKANSKFIGITELHHHHHH

SEQ ID NO: 285 - protein, 540 aa, Artificial Sequence
  This is the amino acid sequence of cat IL-22 polyprotein.
VPISSHCRLDGSNFQQPYITNRTFMLAKEASLADNNTDVRLIGEKLFYEVNMGERCYLMKQVLNFTLEEVLLPQSDRFQPYMQEVVPFLARLSNKLSQCHIDSDDQHIQRNVQNLKDTVKKLGENGEIKVIGELDLLFMALRNACNGSGGQYIKANSKFIGITELAGSGVPISSHCRLDGSNFQQPYITNRTFMLAKEASLADNNTDVRLIGEKLFYEVNMGERCYLMKQVLNFTLEEVLLPQSDRFQPYMQEVVPFLARLSNKLSQCHIDSDDQHIQRNVQNLKDTVKKLGENGEIKVIGELDLLFMALRNACNAGSGFNNFTVSFWLRVPKVSASHLESGGSVPISSHCRLDGSNFQQPYITNRTFMLAKEASLADNNTDVRLIGEKLFYEVNMGERCYLMKQVLNFTLEEVLLPQSDRFQPYMQEVVPFLARLSNKLSQCHIDSDDQHIQRNVQNLKDTVKKLGENGEIKVIGELDLLFMALRNACNAGSGFNNFTVSFWLRVPKVSASHLEGSGGQYIKANSKFIGITELHHHHHH

SEQ ID NO: 286 - protein, 540 aa, Artificial Sequence
  This is the amino acid sequence of human IL-22 polyprotein.
APISSHCRLDKSNFQQPYITNRTFMLAKEASLADNNTDVRLIGEKLFHGVSMSERCYLMKQVLNFTLEEVLFPQSDRFQPYMQEVVPFLARLSNRLSTCHIEGDDLHIQRNVQKLKDTVKKLGESGEIKAIGELDLLFMSLRNACIGSGGQYIKANSKFIGITELAGSGAPISSHCRLDKSNFQQPYITNRTFMLAKEASLADNNTDVRLIGEKLFHGVSMSERCYLMKQVLNFTLEEVLFPQSDRFQPYMQEVVPFLARLSNRLSTCHIEGDDLHIQRNVQKLKDTVKKLGESGEIKAIGELDLLFMSLRNACIAGSGFNNFTVSFWLRVPKVSASHLESGGSAPISSHCRLDKSNFQQPYITNRTFMLAKEASLADNNTDVRLIGEKLFHGVSMSERCYLMKQVLNFTLEEVLFPQSDRFQPYMQEVVPFLARLSNRLSTCHIEGDDLHIQRNVQKLKDTVKKLGESGEIKAIGELDLLFMSLRNACIAGSGFNNFTVSFWLRVPKVSASHLEGSGGQYIKANSKFIGITELHHHHHH

SEQ ID NO: 287 - protein, 408 aa, Artificial Sequence
  This is the amino acid sequence of dog IL-24 polyprotein.
QEFRFGPCRVQGVALRELREAFWTVKDTVQAKDNITSVRLLRKEVLQDVSQEDEMFSISESARRRFLLFQRAFKQLDIQAAQTKAFGEVDILLTWMEKFYEFGSGGQYIKANSKFIGITELAGSGQEFRFGPCRVQGVALRELREAFWTVKDTVQAKDNITSVRLLRKEVLQDVSQEDEMFSISESARRRFLLFQRAFKQLDIQAAQTKAFGEVDILLTWMEKFYEFAGSGFNNFTVSFWLRVPKVSASHLESGGSQEFRFGPCRVQGVALRELREAFWTVKDTVQAKDNITSVRLLRKEVLQDVSQEDEMFSISESARRRFLLFQRAFKQLDIQAAQTKAFGEVDILLTWMEKFYEFAGSGFNNFTVSFWLRVPKVSASHLEGSGGQYIKANSKFIGITELHHHHHH

SEQ ID NO: 288 - protein, 567 aa, Artificial Sequence
  This is the amino acid sequence of dog IL-24 Family polyprotein.
QEFRFGPCRVQGVALRELREAFWTVKDTVQAKDNITSVRLLRKEVLQDVSDAESCYLIRALLKFYLNTVFKNYLDEAADVRIRRSFSTLANNFFVIASKLQPSQEDEMFSISESARRRFLLFQRAFKQLDIQAAQTKAFGEVDILLTWMEKFYEFGSGGQYIKANSKFIGITELAGSGQEFRFGPCRVQGVALRELREAFWTVKDTVQAKDNITSVRLLRKEVLQDVSDAESCYLIRALLKFYLNTVFKNYLDEAADVRIRRSFSTLANNFFVIASKLQPSQEDEMFSISESARRRFLLFQRAFKQLDIQAAQTKAFGEVDILLTWMEKFYEFAGSGFNNFTVSFWLRVPKVSASHLESGGSQEFRFGPCRVQGVALRELREAFWTVKDTVQAKDNITSVRLLRKEVLQDVSDAESCYLIRALLKFYLNTVFKNYLDEAADVRIRRSFSTLANNFFVIASKLQPSQEDEMFSISESARRRFLLFQRAFKQLDIQAAQTKAFGEVDILLTWMEKFYEFAGSGFNNFTVSFWLRVPKVSASHLEGSGGQYIKANSKFIGITELHHHHHH

SEQ ID NO: 289 - protein, 408 aa, Artificial Sequence
  This is the amino acid sequence of cat IL-24 polyprotein.
QEFQFGPCRVEGVVLQELWEAFWAMKDIVQAKDNITNVRLLRKEVLQNVSQENEMFSVSDSARRRFLLFQRAFKQLDIEAAQTKAFGEVDILLTWMEKFYQLGSGGQYIKANSKFIGITELAGSGQEFQFGPCRVEGVVLQELWEAFWAMKDIVQAKDNITNVRLLRKEVLQNVSQENEMFSVSDSARRRFLLFQRAFKQLDIEAAQTKAFGEVDILLTWMEKFYQLAGSGFNNFTVSFWLRVPKVSASHLESGGSQEFQFGPCRVEGVVLQELWEAFWAMKDIVQAKDNITNVRLLRKEVLQNVSQENEMFSVSDSARRRFLLFQRAFKQLDIEAAQTKAFGEVDILLTWMEKFYQLAGSGFNNFTVSFWLRVPKVSASHLEGSGGQYIKANSKFIGITELHHHHHH

SEQ ID NO: 290 - protein, 567 aa, Artificial Sequence
  This is the amino acid sequence of cat IL-24 Family polyprotein.
QEFQFGPCRVEGVVLQELWEAFWAMKDIVQAKDNITNVRLLRKEVLQNVSNAESCYLIRALLKFYLNTVFKNYQDKAADFRVRKSFSTLANNFVVIVSKLQPSQENEMFSVSDSARRRFLLFQRAFKQLDIEAAQTKAFGEVDILLTWMEKFYQLGSGGQYIKANSKFIGITELAGSGQEFQFGPCRVEGVVLQELWEAFWAMKDIVQAKDNITNVRLLRKEVLQNVSNAESCYLIRALLKFYLNTVFKNYQDKAADFRVRKSFSTLANNFVVIVSKLQPSQENEMFSVSDSARRRFLLFQRAFKQLDIEAAQTKAFGEVDILLTWMEKFYQLAGSGFNNFTVSFWLRVPKVSASHLESGGSQEFQFGPCRVEGVVLQELWEAFWAMKDIVQAKDNITNVRLLRKEVLQNVSNAESCYLIRALLKFYLNTVFKNYQDKAADFRVRKSFSTLANNFVVIVSKLQPSQENEMFSVSDSARRRFLLFQRAFKQLDIEAAQTKAFGEVDILLTWMEKFYQLAGSGFNNFTVSFWLRVPKVSASHLEGSGGQYIKANSKFIGITELHHHHHH

SEQ ID NO: 291 - protein, 567 aa, Artificial Sequence
  This is the amino acid sequence of human IL-24 polyprotein.
QEFHFGPCQVKGVVPQKLWEAFWAVKDTMQAQDNITSARLLQQEVLQNVSDAESCYLVHTLLEFYLKTVFKNYHNRTVEVRTLKSFSTLANNFVLIVSQLQPSQENEMFSIRDSAHRRFLLFRRAFKQLDVEAALTKALGEVDILLTWMQKFYKLGSGGQYIKANSKFIGITELAGSGQEFHFGPCQVKGVVPQKLWEAFWAVKDTMQAQDNITSARLLQQEVLQNVSDAESCYLVHTLLEFYLKTVFKNYHNRTVEVRTLKSFSTLANNFVLIVSQLQPSQENEMFSIRDSAHRRFLLFRRAFKQLDVEAALTKALGEVDILLTWMQKFYKLAGSGFNNFTVSFWLRVPKVSASHLESGGSQEFHFGPCQVKGVVPQKLWEAFWAVKDTMQAQDNITSARLLQQEVLQNVSDAESCYLVHTLLEFYLKTVFKNYHNRTVEVRTLKSFSTLANNFVLIVSQLQPSQENEMFSIRDSAHRRFLLFRRAFKQLDVEAALTKALGEVDILLTWMQKFYKLAGSGFNNFTVSFWLRVPKVSASHLEGSGGQYIKANSKFIGITELHHHHHH

SEQ ID NO: 292 - protein, 537 aa, Artificial Sequence
  This is the amino acid sequence of dog IL-25 polyprotein.
CTHWPNCCPSKRQDPTHEWLKRDTVLKFPGETTSLTHHPESCKASEDGPLNSRSISPWKYELDRDLNRLPQDLYHARCLCQHCVSLQTGSHMDPLGNSELLYHNQTVFYRRPCPGEQGAPDGYCLEQRLYRVSLACVCVRPRVMAGSGGQYIKANSKFIGITELAGSGCTHWPNCCPSKRQDPTHEWLKRDTVLKFPGETTSLTHHPESCKASEDGPLNSRSISPWKYELDRDLNRLPQDLYHARCLCQHCVSLQTGSHMDPLGNSELLYHNQTVFYRRPCPGEQGAPDGYCLEQRLYRVSLACVCVRPRVMAAGSGFNNFTVSFWLRVPKVSASHLESGGSCTHWPNCCPSKRQDPTHEWLKRDTVLKFPGETTSLTHHPESCKASEDGPLNSRSISPWKYELDRDLNRLPQDLYHARCLCQHCVSLQTGSHMDPLGNSELLYHNQTVFYRRPCPGEQGAPDGYCLEQRLYRVSLACVCVRPRVMAAGSGFNNFTVSFWLRVPKVSASHLEGSGGQYIKANSKFIGITELHHHHHH

SEQ ID NO: 293 - protein, 537 aa, Artificial Sequence
  This is the amino acid sequence of cat IL-25 polyprotein.
LSHWSSCCPSKGQNPTHEWLTENTVLMTPPESASLIHSLESCRASEDGPLNSRSISPWRYELDRDLNRLPQDLYHARCLCPHCVSLQTGSHMDPLGNSELLYHNQTVFYRRPCPGEQGTRDGYCLEQRLYRVSLACVCVRPRVMAGSGGQYIKANSKFIGITELAGSGLSHWSSCCPSKGQNPTHEWLTENTVLMTPPESASLIHSLESCRASEDGPLNSRSISPWRYELDRDLNRLPQDLYHARCLCPHCVSLQTGSHMDPLGNSELLYHNQTVFYRRPCPGEQGTRDGYCLEQRLYRVSLACVCVRPRVMAAGSGFNNFTVSFWLRVPKVSASHLESGGSLSHWSSCCPSKGQNPTHEWLTENTVLMTPPESASLIHSLESCRASEDGPLNSRSISPWRYELDRDLNRLPQDLYHARCLCPHCVSLQTGSHMDPLGNSELLYHNQTVFYRRPCPGEQGTRDGYCLEQRLYRVSLACVCVRPRVMAAGSGFNNFTVSFWLRVPKVSASHLEGSGGQYIKANSKFIGITELHHHHHH

SEQ ID NO: 294 - protein, 537 aa, Artificial Sequence
  This is the amino acid sequence of human IL-25 polyprotein.
YSHWPSCCPSKGQDTSEELLRWSTVPVPPLEPARPNRHPESCRASEDGPLNSRAISPWRYELDRDLNRLPQDLYHARCLCPHCVSLQTGSHMDPRGNSELLYHNQTVFYRRPCHGEKGTHKGYCLERRLYRVSLACVCVRPRVMGGSGGQYIKANSKFIGITELAGSGYSHWPSCCPSKGQDTSEELLRWSTVPVPPLEPARPNRHPESCRASEDGPLNSRAISPWRYELDRDLNRLPQDLYHARCLCPHCVSLQTGSHMDPRGNSELLYHNQTVFYRRPCHGEKGTHKGYCLERRLYRVSLACVCVRPRVMGAGSGFNNFTVSFWLRVPKVSASHLESGGSYSHWPSCCPSKGQDTSEELLRWSTVPVPPLEPARPNRHPESCRASEDGPLNSRAISPWRYELDRDLNRLPQDLYHARCLCPHCVSLQTGSHMDPRGNSELLYHNQTVFYRRPCHGEKGTHKGYCLERRLYRVSLACVCVRPRVMGAGSGFNNFTVSFWLRVPKVSASHLEGSGGQYIKANSKFIGITELHHHHHH

SEQ ID NO: 295 - protein, 552 aa, Artificial Sequence
  This is the amino acid sequence of dog IL-26 polyprotein.
KHKQSSSAKGCYPRGTLSQAVDTLYVKAAWLKATIPEDRIKNIRLLRKKTKNLFMKNCRFQEQLLSFFMEDVFGQLQLKICREIRFVEELHSLRQQLSRCISCASSAREMKTITRMKSTFYGLGNKGIYKAISELNILLSWIKQFLESIKGSGGQYIKANSKFIGITELAGSGKHKQSSSAKGCYPRGTLSQAVDTLYVKAAWLKATIPEDRIKNIRLLRKKTKNLFMKNCRFQEQLLSFFMEDVFGQLQLKICREIRFVEELHSLRQQLSRCISCASSAREMKTITRMKSTFYGLGNKGIYKAISELNILLSWIKQFLESIKAGSGFNNFTVSFWLRVPKVSASHLESGGSKHKQSSSAKGCYPRGTLSQAVDTLYVKAAWLKATIPEDRIKNIRLLRKKTKNLFMKNCRFQEQLLSFFMEDVFGQLQLKICREIRFVEELHSLRQQLSRCISCASSAREMKTITRMKSTFYGLGNKGIYKAISELNILLSWIKQFLESIKAGSGFNNFTVSFWLRVPKVSASHLEGSGGQYIKANSKFIGITELHHHHHH

SEQ ID NO: 296 - protein, 483 aa, Artificial Sequence
  This is the amino acid sequence of cat IL-26 polyprotein.
KHKQSSSAKGCYPRGTLSQAVDRLYVKAAWLKATIPEDRIKNIRLLKKKTKKLFMKNCRFQEQLLSFFMDDVFGQLQLQVCKERHFVEEFHSLRQQLSRCVLSWVRKTSLIKSPVSGACTLLTGREMGSGGQYIKANSKFIGITELAGSGKHKQSSSAKGCYPRGTLSQAVDRLYVKAAWLKATIPEDRIKNIRLLKKKTKKLFMKNCRFQEQLLSFFMDDVFGQLQLQVCKERHFVEEFHSLRQQLSRCVLSWVRKTSLIKSPVSGACTLLTGREMAGSGFNNFTVSFWLRVPKVSASHLESGGSKHKQSSSAKGCYPRGTLSQAVDRLYVKAAWLKATIPEDRIKNIRLLKKKTKKLFMKNCRFQEQLLSFFMDDVFGQLQLQVCKERHFVEEFHSLRQQLSRCVLSWVRKTSLIKSPVSGACTLLTGREMAGSGFNNFTVSFWLRVPKVSASHLEGSGGQYIKANSKFIGITELHHHHHH

SEQ ID NO: 297 - protein, 552 aa, Artificial Sequence
  This is the amino acid sequence of cat IL-26 family polyprotein.
KHKQSSSAKGCYPRGTLSQAVDRLYVKAAWLKATIPEDRIKNIRLLKKKTKKLFMKNCRFQEQLLSFFMDDVFGQLQLQVCKERHFVEEFHSLRQQLSRCISCASSAREMKTITRMKRTFYGIGNKGIYKAVSELDILLSWIKQFLESIKGSGGQYIKANSKFIGITELAGSGKHKQSSSAKGCYPRGTLSQAVDRLYVKAAWLKATIPEDRIKNIRLLKKKTKKLFMKNCRFQEQLLSFFMDDVFGQLQLQVCKERHFVEEFHSLRQQLSRCISCASSAREMKTITRMKRTFYGIGNKGIYKAVSELDILLSWIKQFLESIKAGSGFNNFTVSFWLRVPKVSASHLESGGSKHKQSSSAKGCYPRGTLSQAVDRLYVKAAWLKATIPEDRIKNIRLLKKKTKKLFMKNCRFQEQLLSFFMDDVFGQLQLQVCKERHFVEEFHSLRQQLSRCISCASSAREMKTITRMKRTFYGIGNKGIYKAVSELDILLSWIKQFLESIKAGSGFNNFTVSFWLRVPKVSASHLEGSGGQYIKANSKFIGITELHHHHHH

SEQ ID NO: 298 - protein, 552 aa, Artificial Sequence
  This is the amino acid sequence of human IL-26 polyprotein.
KHKQSSFTKSCYPRGTLSQAVDALYIKAAWLKATIPEDRIKNIRLLKKKTKKQFMKNCQFQEQLLSFFMEDVFGQLQLQGCKKIRFVEDFHSLRQKLSHCISCASSAREMKSITRMKRIFYRIGNKGIYKAISELDILLSWIKKLLESSQGSGGQYIKANSKFIGITELAGSGKHKQSSFTKSCYPRGTLSQAVDALYIKAAWLKATIPEDRIKNIRLLKKKTKKQFMKNCQFQEQLLSFFMEDVFGQLQLQGCKKIRFVEDFHSLRQKLSHCISCASSAREMKSITRMKRIFYRIGNKGIYKAISELDILLSWIKKLLESSQAGSGFNNFTVSFWLRVPKVSASHLESGGSKHKQSSFTKSCYPRGTLSQAVDALYIKAAWLKATIPEDRIKNIRLLKKKTKKQFMKNCQFQEQLLSFFMEDVFGQLQLQGCKKIRFVEDFHSLRQKLSHCISCASSAREMKSITRMKRIFYRIGNKGIYKAISELDILLSWIKKLLESSQAGSGFNNFTVSFWLRVPKVSASHLEGSGGQYIKANSKFIGITELHHHHHH

SEQ ID NO: 299 - protein, 714 aa, Artificial Sequence
  This is the amino acid sequence of dog IL-27 polyprotein.
FPRPPGRSPLSLQELRREFKVSLQLAKKLFSEVRIQAHHFAESQLPGVSLDLLPLGDQLPNVSLPFQAWHSLSDPERLCFLSMMLHPFHALLESLGSQGGWTSSEKMHLWTMRLDLRDLQRHLRFQVEYPPTCSTPRDQHTKLKLIGSLLKTSPAQRLGKFGGRCSRSSVCVCVCVCVCVCVCPRPRLCSLNLCLPMESWSEQLGSGGQYIKANSKFIGITELAGSGFPRPPGRSPLSLQELRREFKVSLQLAKKLFSEVRIQAHHFAESQLPGVSLDLLPLGDQLPNVSLPFQAWHSLSDPERLCFLSMMLHPFHALLESLGSQGGWTSSEKMHLWTMRLDLRDLQRHLRFQVEYPPTCSTPRDQHTKLKLIGSLLKTSPAQRLGKFGGRCSRSSVCVCVCVCVCVCVCPRPRLCSLNLCLPMESWSEQLAGSGFNNFTVSFWLRVPKVSASHLESGGSFPRPPGRSPLSLQELRREFKVSLQLAKKLFSEVRIQAHHFAESQLPGVSLDLLPLGDQLPNVSLPFQAWHSLSDPERLCFLSMMLHPFHALLESLGSQGGWTSSEKMHLWTMRLDLRDLQRHLRFQVEYPPTCSTPRDQHTKLKLIGSLLKTSPAQRLGKFGGRCSRSSVCVCVCVCVCVCVCPRPRLCSLNLCLPMESWSEQLAGSGFNNFTVSFWLRVPKVSASHLEGSGGQYIKANSKFIGITELHHHHHH

SEQ ID NO: 300 - protein, 726 aa, Artificial Sequence
  This is the amino acid sequence of cat IL-27 polyprotein.
FPRPPGRPPLSLQELRREFKVSLHLARKLFSEVRTQAHRFAESHLPGVSLDLLPLGDRLPNVSLTFQAWHSLSDPERLCFLFMTLRPFHALLGSLGSQGGWTSSEKIDLWTMRLDLRDLQRHLHFQVLAAGLNLPEEEDDEERKEPLPGAPSGLSRVSGQPSWPQLLYTYQLLHSLELVLARAVRDLLLLSQAGNPAPASGSSFGSWPGSGGQYIKANSKFIGITELAGSGFPRPPGRPPLSLQELRREFKVSLHLARKLFSEVRTQAHRFAESHLPGVSLDLLPLGDRLPNVSLTFQAWHSLSDPERLCFLFMTLRPFHALLGSLGSQGGWTSSEKIDLWTMRLDLRDLQRHLHFQVLAAGLNLPEEEDDEERKEPLPGAPSGLSRVSGQPSWPQLLYTYQLLHSLELVLARAVRDLLLLSQAGNPAPASGSSFGSWPAGSGFNNFTVSFWLRVPKVSASHLESGGSFPRPPGRPPLSLQELRREFKVSLHLARKLFSEVRTQAHRFAESHLPGVSLDLLPLGDRLPNVSLTFQAWHSLSDPERLCFLFMTLRPFHALLGSLGSQGGWTSSEKIDLWTMRLDLRDLQRHLHFQVLAAGLNLPEEEDDEERKEPLPGAPSGLSRVSGQPSWPQLLYTYQLLHSLELVLARAVRDLLLLSQAGNPAPASGSSFGSWPAGSGFNNFTVSFWLRVPKVSASHLEGSGGQYIKANSKFIGITELHHHHHH

SEQ ID NO: 301 - protein, 615 aa, Artificial Sequence
  This is the amino acid sequence of dog IL-29 polyprotein.
GPVPTSKPTTTRRGCHMDRFQSLSPRELEAFKKTKDALEESLSWKNWSCSSRLFPRSRDLRLLQAWERPVALEAELDLTLKVLENMTDSSLGVTLDQPLRTLHHIHSELQACVPAQPTADPRPHGRLHHWLHRLQKAPKESQGCLEASITFNLFRLLTRDLKCVASRDLCVGSGGQYIKANSKFIGITELAGSGGPVPTSKPTTTRRGCHMDRFQSLSPRELEAFKKTKDALEESLSWKNWSCSSRLFPRSRDLRLLQAWERPVALEAELDLTLKVLENMTDSSLGVTLDQPLRTLHHIHSELQACVPAQPTADPRPHGRLHHWLHRLQKAPKESQGCLEASITFNLFRLLTRDLKCVASRDLCVAGSGFNNFTVSFWLRVPKVSASHLESGGSGPVPTSKPTTTRRGCHMDRFQSLSPRELEAFKKTKDALEESLSWKNWSCSSRLFPRSRDLRLLQAWERPVALEAELDLTLKVLENMTDSSLGVTLDQPLRTLHHIHSELQACVPAQPTADPRPHGRLHHWLHRLQKAPKESQGCLEASITFNLFRLLTRDLKCVASRDLCVAGSGFNNFTVSFWLRVPKVSASHLEGSGGQYIKANSKFIGITELHHHHHH

SEQ ID NO: 302 - protein, 612 aa, Artificial Sequence
  This is the amino acid sequence of dog IL-29 // IFN-lambda1 polyprotein.
GPVPTSKPTMAWRGCDIGRFKSLSPRELEAFKKAKDALEYSLKNWSCNSRLFPRNRDLRQLQVWERPVALEAELALTLKVLETMADRSLGDILDQPLHTLRHIHSQLQACVSAQPPAGPQPRGRLHPWLHRLHEASKKESQGCLEASVLFNLFRLLKKDLECVAVGDLCVGSGGQYIKANSKFIGITELAGSGGPVPTSKPTMAWRGCDIGRFKSLSPRELEAFKKAKDALEYSLKNWSCNSRLFPRNRDLRQLQVWERPVALEAELALTLKVLETMADRSLGDILDQPLHTLRHIHSQLQACVSAQPPAGPQPRGRLHPWLHRLHEASKKESQGCLEASVLFNLFRLLKKDLECVAVGDLCVAGSGFNNFTVSFWLRVPKVSASHLESGGSGPVPTSKPTMAWRGCDIGRFKSLSPRELEAFKKAKDALEYSLKNWSCNSRLFPRNRDLRQLQVWERPVALEAELALTLKVLETMADRSLGDILDQPLHTLRHIHSQLQACVSAQPPAGPQPRGRLHPWLHRLHEASKKESQGCLEASVLFNLFRLLKKDLECVAVGDLCVAGSGFNNFTVSFWLRVPKVSASHLEGSGGQYIKANSKFIGITELHHHHHH

SEQ ID NO: 303 - protein, 615 aa, Artificial Sequence
  This is the amino acid sequence of cat IL-29 polyprotein.
GPVPTSRPPPTRRGCHVGKFPSLSPRELEAFKKARDALEESLPLKNWSCGSRLFPRTRDLIRLQAWERPAALEAELDLTLKVLGNMTDSSLGVVLDQPLRVVRHIHSELQACVRAQPTAGPRPRGRLHHWLHRLQRPPEESQGCLEASVTFNLFRLLTRDLKCVTGGDLCVGSGGQYIKANSKFIGITELAGSGGPVPTSRPPPTRRGCHVGKFPSLSPRELEAFKKARDALEESLPLKNWSCGSRLFPRTRDLIRLQAWERPAALEAELDLTLKVLGNMTDSSLGVVLDQPLRVVRHIHSELQACVRAQPTAGPRPRGRLHHWLHRLQRPPEESQGCLEASVTFNLFRLLTRDLKCVTGGDLCVAGSGFNNFTVSFWLRVPKVSASHLESGGSGPVPTSRPPPTRRGCHVGKFPSLSPRELEAFKKARDALEESLPLKNWSCGSRLFPRTRDLIRLQAWERPAALEAELDLTLKVLGNMTDSSLGVVLDQPLRVVRHIHSELQACVRAQPTAGPRPRGRLHHWLHRLQRPPEESQGCLEASVTFNLFRLLTRDLKCVTGGDLCVAGSGFNNFTVSFWLRVPKVSASHLEGSGGQYIKANSKFIGITELHHHHHH

SEQ ID NO: 304 - protein, 615 aa, Artificial Sequence
  This is the amino acid sequence of cat IL-29 // IFN-lambda1 polyprotein.
GPVPTSRPPPTRRGCHVGKFPSLSPRELEAFKKARDALEESLPLKNWSCGSRLFPRTRDLIRLQAWERPAALEAELDLTLKVLGNMTDSSLGVVLDQPLRVLRHIHSELQACVRAQPTAGPRPRGRLHHWLHRLQRAPEESQGCLEASVTFNLFRLLTRDLKCVTGGDLCVGSGGQYIKANSKFIGITELAGSGGPVPTSRPPPTRRGCHVGKFPSLSPRELEAFKKARDALEESLPLKNWSCGSRLFPRTRDLIRLQAWERPAALEAELDLTLKVLGNMTDSSLGVVLDQPLRVLRHIHSELQACVRAQPTAGPRPRGRLHHWLHRLQRAPEESQGCLEASVTFNLFRLLTRDLKCVTGGDLCVAGSGFNNFTVSFWLRVPKVSASHLESGGSGPVPTSRPPPTRRGCHVGKFPSLSPRELEAFKKARDALEESLPLKNWSCGSRLFPRTRDLIRLQAWERPAALEAELDLTLKVLGNMTDSSLGVVLDQPLRVLRHIHSELQACVRAQPTAGPRPRGRLHHWLHRLQRAPEESQGCLEASVTFNLFRLLTRDLKCVTGGDLCVAGSGFNNFTVSFWLRVPKVSASHLEGSGGQYIKANSKFIGITELHHHHHH

SEQ ID NO: 305 - protein, 645 aa, Artificial Sequence
  This is the amino acid sequence of human IL-29 // IFN-lambda1 polyprotein.
GPVPTSKPTTTGKGCHIGRFKSLSPQELASFKKARDALEESLKLKNWSCSSPVFPGNWDLRLLQVRERPVALEAELALTLKVLEAAAGPALEDVLDQPLHTLHHILSQLQACIQPQPTAGPRPRGRLHHWLHRLQEAPKKESAGCLEASVTFNLFRLLTRDLKYVADGNLCLRTSTHPESTGSGGQYIKANSKFIGITELAGSGGPVPTSKPTTTGKGCHIGRFKSLSPQELASFKKARDALEESLKLKNWSCSSPVFPGNWDLRLLQVRERPVALEAELALTLKVLEAAAGPALEDVLDQPLHTLHHILSQLQACIQPQPTAGPRPRGRLHHWLHRLQEAPKKESAGCLEASVTFNLFRLLTRDLKYVADGNLCLRTSTHPESTAGSGFNNFTVSFWLRVPKVSASHLESGGSGPVPTSKPTTTGKGCHIGRFKSLSPQELASFKKARDALEESLKLKNWSCSSPVFPGNWDLRLLQVRERPVALEAELALTLKVLEAAAGPALEDVLDQPLHTLHHILSQLQACIQPQPTAGPRPRGRLHHWLHRLQEAPKKESAGCLEASVTFNLFRLLTRDLKYVADGNLCLRTSTHPESTAGSGFNNFTVSFWLRVPKVSASHLEGSGGQYIKANSKFIGITELHHHHHH

SEQ ID NO: 306 - protein, 582 aa, Artificial Sequence
  This is the amino acid sequence of cat IL-32 polyprotein.
MRHQMHQLVDIFCDRTQHQSRGAPQQRLRLGEVEDGFNEIMLEAVDLHHHQNDDEESSPLLPEVRQELRSRVLRSSVLDLEEKEHPVVQKTEESFCDRALRLFRRLLYQLQLKWQAALAWLREKVAAGFQAFCDAVEAICSAFNSFCTSVAQVFRSAVQAGSGGQYIKANSKFIGITELAGSGMRHQMHQLVDIFCDRTQHQSRGAPQQRLRLGEVEDGFNEIMLEAVDLHHHQNDDEESSPLLPEVRQELRSRVLRSSVLDLEEKEHPVVQKTEESFCDRALRLFRRLLYQLQLKWQAALAWLREKVAAGFQAFCDAVEAICSAFNSFCTSVAQVFRSAVQAAGSGFNNFTVSFWLRVPKVSASHLESGGSMRHQMHQLVDIFCDRTQHQSRGAPQQRLRLGEVEDGFNEIMLEAVDLHHHQNDDEESSPLLPEVRQELRSRVLRSSVLDLEEKEHPVVQKTEESFCDRALRLFRRLLYQLQLKWQAALAWLREKVAAGFQAFCDAVEAICSAFNSFCTSVAQVFRSAVQAAGSGFNNFTVSFWLRVPKVSASHLEGSGGQYIKANSKFIGITELHHHHHH

SEQ ID NO: 307 - protein, 744 aa, Artificial Sequence
  This is the amino acid sequence of bovine IL-34 polyprotein.
NEGLEPWPLTRSDECAITGFLRDKLQYRNRLQYMKHYFPINYRVSVPYEGVLRTANVTRLQRAQVSQQELRYLWVLVSLSATEWVQEVLLEGHPSWKYLEEVHTLLLDVKQGLGGVEVSPQVEAVLNLLSAPGSLKLVRPKALLDNCFRVMQLLYCPCCKESSVLNWQDCEAPQPQPRSPASAQCEAAQLYPLPQPPSTSLPRVLGPSAGPPTQGSGGQYIKANSKFIGITELAGSGNEGLEPWPLTRSDECAITGFLRDKLQYRNRLQYMKHYFPINYRVSVPYEGVLRTANVTRLQRAQVSQQELRYLWVLVSLSATEWVQEVLLEGHPSWKYLEEVHTLLLDVKQGLGGVEVSPQVEAVLNLLSAPGSLKLVRPKALLDNCFRVMQLLYCPCCKESSVLNWQDCEAPQPQPRSPASAQCEAAQLYPLPQPPSTSLPRVLGPSAGPPTQAGSGFNNFTVSFWLRVPKVSASHLESGGSNEGLEPWPLTRSDECAITGFLRDKLQYRNRLQYMKHYFPINYRVSVPYEGVLRTANVTRLQRAQVSQQELRYLWVLVSLSATEWVQEVLLEGHPSWKYLEEVHTLLLDVKQGLGGVEVSPQVEAVLNLLSAPGSLKLVRPKALLDNCFRVMQLLYCPCCKESSVLNWQDCEAPQPQPRSPASAQCEAAQLYPLPQPPSTSLPRVLGPSAGPPTQAGSGFNNFTVSFWLRVPKVSASHLEGSGGQYIKANSKFIGITELHHHHHH

SEQ ID NO: 308 - protein, 561 aa, Artificial Sequence
  This is the amino acid sequence of human IL-36-alpha polyprotein.
KIDTPQQGSIQDINHRVWVLQDQTLIAVPRKDRMSPVTIALISCRHVETLEKDRGNPIYLGLNGLNLCLMCAKVGDQPTLQLKEKDIMDLYNQPEPVKSFLFYHSQSGRNSTFESVAFPGWFIAVSSEGGCPLILTQELGKANTTDFGLTMLFGSGGQYIKANSKFIGITELAGSGKIDTPQQGSIQDINHRVWVLQDQTLIAVPRKDRMSPVTIALISCRHVETLEKDRGNPIYLGLNGLNLCLMCAKVGDQPTLQLKEKDIMDLYNQPEPVKSFLFYHSQSGRNSTFESVAFPGWFIAVSSEGGCPLILTQELGKANTTDFGLTMLFAGSGFNNFTVSFWLRVPKVSASHLESGGSKIDTPQQGSIQDINHRVWVLQDQTLIAVPRKDRMSPVTIALISCRHVETLEKDRGNPIYLGLNGLNLCLMCAKVGDQPTLQLKEKDIMDLYNQPEPVKSFLFYHSQSGRNSTFESVAFPGWFIAVSSEGGCPLILTQELGKANTTDFGLTMLFAGSGFNNFTVSFWLRVPKVSASHLEGSGGQYIKANSKFIGITELHHHHHH

SEQ ID NO: 309 - protein, 582 aa, Artificial Sequence
  This is the amino acid sequence of human IL-36-beta polyprotein.
REAAPKSYAIRDSRQMVWVLSGNSLIAAPLSRSIKPVTLHLIACRDTEFSDKEKGNMVYLGIKGKDLCLFCAEIQGKPTLQLKLQGSQDNIGKDTCWKLVGIHTCINLDVRESCFMGTLDQWGIGVGRKKWKSSFQHHHLRKKDKDFSSMRTNIGMPGRMGSGGQYIKANSKFIGITELAGSGREAAPKSYAIRDSRQMVWVLSGNSLIAAPLSRSIKPVTLHLIACRDTEFSDKEKGNMVYLGIKGKDLCLFCAEIQGKPTLQLKLQGSQDNIGKDTCWKLVGIHTCINLDVRESCFMGTLDQWGIGVGRKKWKSSFQHHHLRKKDKDFSSMRTNIGMPGRMAGSGFNNFTVSFWLRVPKVSASHLESGGSREAAPKSYAIRDSRQMVWVLSGNSLIAAPLSRSIKPVTLHLIACRDTEFSDKEKGNMVYLGIKGKDLCLFCAEIQGKPTLQLKLQGSQDNIGKDTCWKLVGIHTCINLDVRESCFMGTLDQWGIGVGRKKWKSSFQHHHLRKKDKDFSSMRTNIGMPGRMAGSGFNNFTVSFWLRVPKVSASHLEGSGGQYIKANSKFIGITELHHHHHH

SEQ ID NO: 310 - protein, 558 aa, Artificial Sequence
  This is the amino acid sequence of human IL-36-gamma polyprotein.
SMCKPITGTINDLNQQVWTLQGQNLVAVPRSDSVTPVTVAVITCKYPEALEQGRGDPIYLGIQNPEMCLYCEKVGEQPTLQLKEQKIMDLYGQPEPVKPFLFYRAKTGRTSTLESVAFPDWFIASSKRDQPIILTSELGKSYNTAFELNINDGSGGQYIKANSKFIGITELAGSGSMCKPITGTINDLNQQVWTLQGQNLVAVPRSDSVTPVTVAVITCKYPEALEQGRGDPIYLGIQNPEMCLYCEKVGEQPTLQLKEQKIMDLYGQPEPVKPFLFYRAKTGRTSTLESVAFPDWFIASSKRDQPIILTSELGKSYNTAFELNINDAGSGFNNFTVSFWLRVPKVSASHLESGGSSMCKPITGTINDLNQQVWTLQGQNLVAVPRSDSVTPVTVAVITCKYPEALEQGRGDPIYLGIQNPEMCLYCEKVGEQPTLQLKEQKIMDLYGQPEPVKPFLFYRAKTGRTSTLESVAFPDWFIASSKRDQPIILTSELGKSYNTAFELNINDAGSGFNNFTVSFWLRVPKVSASHLEGSGGQYIKANSKFIGITELHHHHHH

SEQ ID NO: 311 - protein, 681 aa, Artificial Sequence
  This is the amino acid sequence of canine IL-37 polyprotein.
MSFLEDSGVKMESEDWERDEPHGCSEGPKVKVSYPEKFSIHDRDHKVLVLDCDTLRAVPFKTYIRPEMFFVLASSLSSASKEKGSPILLAVCKGELCLCCEKDRRQSQPSLQLKKKKLTNLAAQKESARQPFIFYRTKVGSQNRLESAAHPGWFICTSRNSGEPVGVTNVLGKRKHTEFSFHRAETSPSEVSGGSGGQYIKANSKFIGITELAGSGMSFLEDSGVKMESEDWERDEPHGCSEGPKVKVSYPEKFSIHDRDHKVLVLDCDTLRAVPFKTYIRPEMFFVLASSLSSASKEKGSPILLAVCKGELCLCCEKDRRQSQPSLQLKKKKLTNLAAQKESARQPFIFYRTKVGSQNRLESAAHPGWFICTSRNSGEPVGVTNVLGKRKHTEFSFHRAETSPSEVSGAGSGFNNFTVSFWLRVPKVSASHLESGGSMSFLEDSGVKMESEDWERDEPHGCSEGPKVKVSYPEKFSIHDRDHKVLVLDCDTLRAVPFKTYIRPEMFFVLASSLSSASKEKGSPILLAVCKGELCLCCEKDRRQSQPSLQLKKKKLTNLAAQKESARQPFIFYRTKVGSQNRLESAAHPGWFICTSRNSGEPVGVTNVLGKRKHTEFSFHRAETSPSEVSGAGSGFNNFTVSFWLRVPKVSASHLEGSGGQYIKANSKFIGITELHHHHHH

SEQ ID NO: 312 - protein, 558 aa, Artificial Sequence
  This is the amino acid sequence of human IL-38 polyprotein.
MCSLPMARYYIIKYADQKALYTRDGQLLVGDPVADNCCAEKICILPNRGLARTKVPIFLGIQGGSRCLACVETEEGPSLQLEDVNIEELYKGGEEATRFTFFQSSSGSAFRLEAAAWPGWFLCGPAEPQQPVQLTKESEPSARTKFYFEQSWGSGGQYIKANSKFIGITELAGSGMCSLPMARYYIIKYADQKALYTRDGQLLVGDPVADNCCAEKICILPNRGLARTKVPIFLGIQGGSRCLACVETEEGPSLQLEDVNIEELYKGGEEATRFTFFQSSSGSAFRLEAAAWPGWFLCGPAEPQQPVQLTKESEPSARTKFYFEQSWAGSGFNNFTVSFWLRVPKVSASHLESGGSMCSLPMARYYIIKYADQKALYTRDGQLLVGDPVADNCCAEKICILPNRGLARTKVPIFLGIQGGSRCLACVETEEGPSLQLEDVNIEELYKGGEEATRFTFFQSSSGSAFRLEAAAWPGWFLCGPAEPQQPVQLTKESEPSARTKFYFEQSWAGSGFNNFTVSFWLRVPKVSASHLEGSGGQYIKANSKFIGITELHHHHHH

SEQ ID NO: 313 - protein, 837 aa, Artificial Sequence
  This is the amino acid sequence of human IL-40 polyprotein.
REEEITPVVSIAYKVLEVFPKGRWVLITCCAPQPPPPITYSLCGTKNIKVAKKVVKTHEPASFNLNVTLKSSPDLLTYFCWASSTSGAHVDSARLQMHWELWSKPVSELRANFTLQDRGAGPRVEMICQASSGSPPITNSLIGKDGQVHLQQRPCHRQPANFSFLPSQTSDWFWCQAANNANVQHSALTVVPPGGDQKMEDWQGPLESPILALPLYRSTRRLSEEEFGGFRIGNGEVRGRKAAAMGSGGQYIKANSKFIGITELAGSGREEEITPVVSIAYKVLEVFPKGRWVLITCCAPQPPPPITYSLCGTKNIKVAKKVVKTHEPASFNLNVTLKSSPDLLTYFCWASSTSGAHVDSARLQMHWELWSKPVSELRANFTLQDRGAGPRVEMICQASSGSPPITNSLIGKDGQVHLQQRPCHRQPANFSFLPSQTSDWFWCQAANNANVQHSALTVVPPGGDQKMEDWQGPLESPILALPLYRSTRRLSEEEFGGFRIGNGEVRGRKAAAMAGSGFNNFTVSFWLRVPKVSASHLESGGSREEEITPVVSIAYKVLEVFPKGRWVLITCCAPQPPPPITYSLCGTKNIKVAKKVVKTHEPASFNLNVTLKSSPDLLTYFCWASSTSGAHVDSARLQMHWELWSKPVSELRANFTLQDRGAGPRVEMICQASSGSPPITNSLIGKDGQVHLQQRPCHRQPANFSFLPSQTSDWFWCQAANNANVQHSALTVVPPGGDQKMEDWQGPLESPILALPLYRSTRRLSEEEFGGFRIGNGEVRGRKAAAMAGSGFNNFTVSFWLRVPKVSASHLEGSGGQYIKANSKFIGITELHHHHHH

SEQ ID NO: 314 - protein, 843 aa, Artificial Sequence
  This is the amino acid sequence of canine IL-40 isoform X2 polyprotein.
MRLLLLLCLALLATCSFSLEQEVEVTPETFIAYKVREVFPSSRRVVITCHSPRAPPPITYSLWGSQGVEVAKKVVKTGDPASFSINITLKSRPELLTYSCRAASLRGEHSASTKLQMYWELWAKPMAQPRANFVLLERGSGPRVEISCQVSSGSPPITYSLVRKDGYVHRQQRPTYGQPANFSFPLTRTSNWLRCQAANDISVQSSPFRLVPPGYLPQGPVLVLAGSLTSIAAVTSWVLGPALWTRLGSGGQYIKANSKFIGITELAGSGMRLLLLLCLALLATCSFSLEQEVEVTPETFIAYKVREVFPSSRRVVITCHSPRAPPPITYSLWGSQGVEVAKKVVKTGDPASFSINITLKSRPELLTYSCRAASLRGEHSASTKLQMYWELWAKPMAQPRANFVLLERGSGPRVEISCQVSSGSPPITYSLVRKDGYVHRQQRPTYGQPANFSFPLTRTSNWLRCQAANDISVQSSPFRLVPPGYLPQGPVLVLAGSLTSIAAVTSWVLGPALWTRLAGSGFNNFTVSFWLRVPKVSASHLESGGSMRLLLLLCLALLATCSFSLEQEVEVTPETFIAYKVREVFPSSRRVVITCHSPRAPPPITYSLWGSQGVEVAKKVVKTGDPASFSINITLKSRPELLTYSCRAASLRGEHSASTKLQMYWELWAKPMAQPRANFVLLERGSGPRVEISCQVSSGSPPITYSLVRKDGYVHRQQRPTYGQPANFSFPLTRTSNWLRCQAANDISVQSSPFRLVPPGYLPQGPVLVLAGSLTSIAAVTSWVLGPALWTRLAGSGFNNFTVSFWLRVPKVSASHLEGSGGQYIKANSKFIGITELHHHHHH

SEQ ID NO: 315 - protein, 900 aa, Artificial Sequence
  This is the amino acid sequence of human IL-41, Meteorin-like protein polyprotein.
QYSSDRCSWKGSGLTHEAHRKEVEQVYLRCAAGAVEWMYPTGALIVNLRPNTFSPARHLTVCIRSFTDSSGANIYLEKTGELRLLVPDGDGRPGRVQCFGLEQGGLFVEATPQQDIGRRTTGFQYELVRRHRASDLHELSAPCRPCSDTEVLLAVCTSDFAVRGSIQQVTHEPERQDSAIHLRVSRLYRQKSRVFEPVPEGDGHWQGRVRTLLECGVRPGHGDFLFTGHMHFGEARLGCAPRFKDFQRMYRDAQERGLNPCEVGTDGSGGQYIKANSKFIGITELAGSGQYSSDRCSWKGSGLTHEAHRKEVEQVYLRCAAGAVEWMYPTGALIVNLRPNTFSPARHLTVCIRSFTDSSGANIYLEKTGELRLLVPDGDGRPGRVQCFGLEQGGLFVEATPQQDIGRRTTGFQYELVRRHRASDLHELSAPCRPCSDTEVLLAVCTSDFAVRGSIQQVTHEPERQDSAIHLRVSRLYRQKSRVFEPVPEGDGHWQGRVRTLLECGVRPGHGDFLFTGHMHFGEARLGCAPRFKDFQRMYRDAQERGLNPCEVGTDAGSGFNNFTVSFWLRVPKVSASHLESGGSQYSSDRCSWKGSGLTHEAHRKEVEQVYLRCAAGAVEWMYPTGALIVNLRPNTFSPARHLTVCIRSFTDSSGANIYLEKTGELRLLVPDGDGRPGRVQCFGLEQGGLFVEATPQQDIGRRTTGFQYELVRRHRASDLHELSAPCRPCSDTEVLLAVCTSDFAVRGSIQQVTHEPERQDSAIHLRVSRLYRQKSRVFEPVPEGDGHWQGRVRTLLECGVRPGHGDFLFTGHMHFGEARLGCAPRFKDFQRMYRDAQERGLNPCEVGTDAGSGFNNFTVSFWLRVPKVSASHLEGSGGQYIKANSKFIGITELHHHHHH

SEQ ID NO: 316 - protein, 990 aa, Artificial Sequence
  This is the amino acid sequence of canine IL-41, Meteorin-like protein polyprotein.
MPPSVMSQMCTFLHRQQFCTNRSFFGFAVALEHRSERFDQIFCGLTHEAHRKEVEQVYLRCSAGSVEWMYPTGALIVNVRPNTFPPSRHLTLCIKPLKDSSGANIYLEKTGELKLLVRDGDRGPGQVRCFGFEQGGLFVEAAPQQDISRRTTGFQYELTSRHAESDLHTLSAPCRPCSDAEVLLAVCTSDFVVRGSIQNVTHVPEQQESAIHLRVSRLYRQKSRVFRPAPEGGGWRGRVATLLECGVRPGRGEFLFTGHMHFGEARLGCAPRFKDFQRMYQDAEERGLNPCEMGKDGSGGQYIKANSKFIGITELAGSGMPPSVMSQMCTFLHRQQFCTNRSFFGFAVALEHRSERFDQIFCGLTHEAHRKEVEQVYLRCSAGSVEWMYPTGALIVNVRPNTFPPSRHLTLCIKPLKDSSGANIYLEKTGELKLLVRDGDRGPGQVRCFGFEQGGLFVEAAPQQDISRRTTGFQYELTSRHAESDLHTLSAPCRPCSDAEVLLAVCTSDFVVRGSIQNVTHVPEQQESAIHLRVSRLYRQKSRVFRPAPEGGGWRGRVATLLECGVRPGRGEFLFTGHMHFGEARLGCAPRFKDFQRMYQDAEERGLNPCEMGKDAGSGFNNFTVSFWLRVPKVSASHLESGGSMPPSVMSQMCTFLHRQQFCTNRSFFGFAVALEHRSERFDQIFCGLTHEAHRKEVEQVYLRCSAGSVEWMYPTGALIVNVRPNTFPPSRHLTLCIKPLKDSSGANIYLEKTGELKLLVRDGDRGPGQVRCFGFEQGGLFVEAAPQQDISRRTTGFQYELTSRHAESDLHTLSAPCRPCSDAEVLLAVCTSDFVVRGSIQNVTHVPEQQESAIHLRVSRLYRQKSRVFRPAPEGGGWRGRVATLLECGVRPGRGEFLFTGHMHFGEARLGCAPRFKDFQRMYQDAEERGLNPCEMGKDAGSGFNNFTVSFWLRVPKVSASHLEGSGGQYIKANSKFIGITELHHHHHH

SEQ ID NO: 317 - protein, 900 aa, Artificial Sequence
  This is the amino acid sequence of felis IL-41, Meteorin-like protein polyprotein.
QYSSDRCSWKGSGLTHEAHRKEVEQVYLRCSAGSVEWMYPTGALIVNVRPNTFPPSRRHLTLCIKPLRDSSGANIYLEKTGELQLLVRDGDRGPRQVHCFGFEQRGLFVEATPQQDISRRTTGFQYELTSRHAESDLRAQSAPCRPCSDTEVLLAVCTSDFVVRGSIQDVTHEPEQQESAIHLHVNRLYRQKSTVFRPAPEGGGWRGHVTTLLECGVRPGRGEFLFTGPIHFGEAHLGCAPRFKDFQRMYKDAEEKGLNPCEMGTEGSGGQYIKANSKFIGITELAGSGQYSSDRCSWKGSGLTHEAHRKEVEQVYLRCSAGSVEWMYPTGALIVNVRPNTFPPSRRHLTLCIKPLRDSSGANIYLEKTGELQLLVRDGDRGPRQVHCFGFEQRGLFVEATPQQDISRRTTGFQYELTSRHAESDLRAQSAPCRPCSDTEVLLAVCTSDFVVRGSIQDVTHEPEQQESAIHLHVNRLYRQKSTVFRPAPEGGGWRGHVTTLLECGVRPGRGEFLFTGPIHFGEAHLGCAPRFKDFQRMYKDAEEKGLNPCEMGTEAGSGFNNFTVSFWLRVPKVSASHLESGGSQYSSDRCSWKGSGLTHEAHRKEVEQVYLRCSAGSVEWMYPTGALIVNVRPNTFPPSRRHLTLCIKPLRDSSGANIYLEKTGELQLLVRDGDRGPRQVHCFGFEQRGLFVEATPQQDISRRTTGFQYELTSRHAESDLRAQSAPCRPCSDTEVLLAVCTSDFVVRGSIQDVTHEPEQQESAIHLHVNRLYRQKSTVFRPAPEGGGWRGHVTTLLECGVRPGRGEFLFTGPIHFGEAHLGCAPRFKDFQRMYKDAEEKGLNPCEMGTEAGSGFNNFTVSFWLRVPKVSASHLEGSGGQYIKANSKFIGITELHHHHHH

SEQ ID NO: 318 - protein, 531 aa, Artificial Sequence
  This is the amino acid sequence of bovine interferon-gamma polyprotein.
QGQFFREIENLKEYFNASSPDVAKGGPLFSEILKNWKDESDKKIIQSQIVSFYFKLFENLKDNQVIQRSMDIIKQDMFQKFLNGSSEKLEDFKKLIQIPVDDLQIQRKAINELIKVMNDLSPKSNLRKRKRSQNLFRGRRASMGSGGQYIKANSKFIGITELAGSGQGQFFREIENLKEYFNASSPDVAKGGPLFSEILKNWKDESDKKIIQSQIVSFYFKLFENLKDNQVIQRSMDIIKQDMFQKFLNGSSEKLEDFKKLIQIPVDDLQIQRKAINELIKVMNDLSPKSNLRKRKRSQNLFRGRRASMAGSGFNNFTVSFWLRVPKVSASHLESGGSQGQFFREIENLKEYFNASSPDVAKGGPLFSEILKNWKDESDKKIIQSQIVSFYFKLFENLKDNQVIQRSMDIIKQDMFQKFLNGSSEKLEDFKKLIQIPVDDLQIQRKAINELIKVMNDLSPKSNLRKRKRSQNLFRGRRASMAGSGFNNFTVSFWLRVPKVSASHLEGSGGQYIKANSKFIGITELHHHHHH

SEQ ID NO: 319 - protein, 531 aa, Artificial Sequence
  This is the amino acid sequence of canis interferon-gamma polyprotein.
QAMFFKEIENLKEYFNASNPDVSDGGSLFVDILKKWREESDKTIIQSQIVSFYLKLFDNFKDNQIIQRSMDTIKEDMLGKFLNSSTSKREDFLKLIQIPVNDLQVQRKAINELIKVMNDLSPRSNLRKRKRSQNLFRGRRASKGSGGQYIKANSKFIGITELAGSGQAMFFKEIENLKEYFNASNPDVSDGGSLFVDILKKWREESDKTIIQSQIVSFYLKLFDNFKDNQIIQRSMDTIKEDMLGKFLNSSTSKREDFLKLIQIPVNDLQVQRKAINELIKVMNDLSPRSNLRKRKRSQNLFRGRRASKAGSGFNNFTVSFWLRVPKVSASHLESGGSQAMFFKEIENLKEYFNASNPDVSDGGSLFVDILKKWREESDKTIIQSQIVSFYLKLFDNFKDNQIIQRSMDTIKEDMLGKFLNSSTSKREDFLKLIQIPVNDLQVQRKAINELIKVMNDLSPRSNLRKRKRSQNLFRGRRASKAGSGFNNFTVSFWLRVPKVSASHLEGSGGQYIKANSKFIGITELHHHHHH

SEQ ID NO: 320 - protein, 534 aa, Artificial Sequence
  This is the amino acid sequence of felis interferon-gamma polyprotein.
QAMFFKEIEELKGYFNASNPDVADGGSLFVDILKNWKEESDKTIIQSQIVSFYLKMFENLKDDDQRIQRSMDTIKEDMLDKLLNTSSSKRDDFLKLIQIPVNDLQVQRKAINELFKVMNDLSPRSNLRKRKRSQNLFRGRRASKGSGGQYIKANSKFIGITELAGSGQAMFFKEIEELKGYFNASNPDVADGGSLFVDILKNWKEESDKTIIQSQIVSFYLKMFENLKDDDQRIQRSMDTIKEDMLDKLLNTSSSKRDDFLKLIQIPVNDLQVQRKAINELFKVMNDLSPRSNLRKRKRSQNLFRGRRASKAGSGFNNFTVSFWLRVPKVSASHLESGGSQAMFFKEIEELKGYFNASNPDVADGGSLFVDILKNWKEESDKTIIQSQIVSFYLKMFENLKDDDQRIQRSMDTIKEDMLDKLLNTSSSKRDDFLKLIQIPVNDLQVQRKAINELFKVMNDLSPRSNLRKRKRSQNLFRGRRASKAGSGFNNFTVSFWLRVPKVSASHLEGSGGQYIKANSKFIGITELHHHHHH

SEQ ID NO: 321 - protein, 600 aa, Artificial Sequence
  This is the amino acid sequence of bovine interferon-alpha A polyprotein.
CHLPHTHSLANRRVLMLLQQLRRVSPSSCLQDRNDFEFLQEALGGSQLQKAQAISVLHEVTQHTFQLFSTEGSPATWDKSLLDKLRAALDQQLTDLQACLTQEEGLRGAPLLKEDSSLAVRKYFHRLTLYLQEKRHSPCAWEVVRAEVMRAFSSSTNLQESFRRKDGSGGQYIKANSKFIGITELAGSGCHLPHTHSLANRRVLMLLQQLRRVSPSSCLQDRNDFEFLQEALGGSQLQKAQAISVLHEVTQHTFQLFSTEGSPATWDKSLLDKLRAALDQQLTDLQACLTQEEGLRGAPLLKEDSSLAVRKYFHRLTLYLQEKRHSPCAWEVVRAEVMRAFSSSTNLQESFRRKDAGSGFNNFTVSFWLRVPKVSASHLESGGSCHLPHTHSLANRRVLMLLQQLRRVSPSSCLQDRNDFEFLQEALGGSQLQKAQAISVLHEVTQHTFQLFSTEGSPATWDKSLLDKLRAALDQQLTDLQACLTQEEGLRGAPLLKEDSSLAVRKYFHRLTLYLQEKRHSPCAWEVVRAEVMRAFSSSTNLQESFRRKDAGSGFNNFTVSFWLRVPKVSASHLEGSGGQYIKANSKFIGITELHHHHHH

SEQ ID NO: 322 - protein, 594 aa, Artificial Sequence
  This is the amino acid sequence of canine interferon-alpha 1 of 2 polyprotein.
CHLPDTHGLRNWRVLTLLGQMRRLSAGSCDHYTNDFAFPKELFDGQRLQEAQALSVVHVMTQKVFHLFCPDTSSAPWNMTLLEELCSGLSEQLDDLEACPLQEAGLAETPLMHEDSTLRTYFQRISLYLQDRNHSPCAWEMVRAEIGRSFFSSTILQERIRRRKGSGGQYIKANSKFIGITELAGSGCHLPDTHGLRNWRVLTLLGQMRRLSAGSCDHYTNDFAFPKELFDGQRLQEAQALSVVHVMTQKVFHLFCPDTSSAPWNMTLLEELCSGLSEQLDDLEACPLQEAGLAETPLMHEDSTLRTYFQRISLYLQDRNHSPCAWEMVRAEIGRSFFSSTILQERIRRRKAGSGFNNFTVSFWLRVPKVSASHLESGGSCHLPDTHGLRNWRVLTLLGQMRRLSAGSCDHYTNDFAFPKELFDGQRLQEAQALSVVHVMTQKVFHLFCPDTSSAPWNMTLLEELCSGLSEQLDDLEACPLQEAGLAETPLMHEDSTLRTYFQRISLYLQDRNHSPCAWEMVRAEIGRSFFSSTILQERIRRRKAGSGFNNFTVSFWLRVPKVSASHLEGSGGQYIKANSKFIGITELHHHHHH

SEQ ID NO: 323 - protein, 615 aa, Artificial Sequence
  This is the amino acid sequence of feline interferon-alpha polyprotein.
CDLPQTHGLLNRRALTLLGQMRRLPASSCQKDRNDFAFPQDVFGGDQSHKAQALSVVHVTNQKIFHFFCTEASSSAAWNTTLLEEFCTGLDRQLTRLEACVLQEVEEGEAPLTNEDIHPEDSILRNYFQRLSLYLQEKKYSPCAWEIVRAEIMRSLYYSSTALQKRLRSEKGSGGQYIKANSKFIGITELAGSGCDLPQTHGLLNRRALTLLGQMRRLPASSCQKDRNDFAFPQDVFGGDQSHKAQALSVVHVTNQKIFHFFCTEASSSAAWNTTLLEEFCTGLDRQLTRLEACVLQEVEEGEAPLTNEDIHPEDSILRNYFQRLSLYLQEKKYSPCAWEIVRAEIMRSLYYSSTALQKRLRSEKAGSGFNNFTVSFWLRVPKVSASHLESGGSCDLPQTHGLLNRRALTLLGQMRRLPASSCQKDRNDFAFPQDVFGGDQSHKAQALSVVHVTNQKIFHFFCTEASSSAAWNTTLLEEFCTGLDRQLTRLEACVLQEVEEGEAPLTNEDIHPEDSILRNYFQRLSLYLQEKKYSPCAWEIVRAEIMRSLYYSSTALQKRLRSEKAGSGFNNFTVSFWLRVPKVSASHLEGSGGQYIKANSKFIGITELHHHHHH

SEQ ID NO: 324 - protein, 480 aa, Artificial Sequence
  This is the amino acid sequence of bovine Granulocyte-macrophage colony-stimulating factor polyprotein.
APTRPPNTATRPWQHVDAIKEALSLLNHSSDTDAVMNDTEVVSEKFDSQEPTCLQTRLKLYKNGLQGSLTSLMGSLTMMATHYEKHCPPTPETSCGTQFISFKNFKEDLKEFLFIIPFDCWEPAQKGSGGQYIKANSKFIGITELAGSGAPTRPPNTATRPWQHVDAIKEALSLLNHSSDTDAVMNDTEVVSEKFDSQEPTCLQTRLKLYKNGLQGSLTSLMGSLTMMATHYEKHCPPTPETSCGTQFISFKNFKEDLKEFLFIIPFDCWEPAQKAGSGFNNFTVSFWLRVPKVSASHLESGGSAPTRPPNTATRPWQHVDAIKEALSLLNHSSDTDAVMNDTEVVSEKFDSQEPTCLQTRLKLYKNGLQGSLTSLMGSLTMMATHYEKHCPPTPETSCGTQFISFKNFKEDLKEFLFIIPFDCWEPAQKAGSGFNNFTVSFWLRVPKVSASHLEGSGGQYIKANSKFIGITELHHHHHH

SEQ ID NO: 325 - protein, 483 aa, Artificial Sequence
  This is the amino acid sequence of canine Granulocyte-macrophage colony-stimulating factor polyprotein.
APTRSPTLVTRPSQHVDAIQEALSLLNNSNDVTAVMNKAVKVVSEVFDPEGPTCLETRLQLYKEGLQGSLTSLKNPLTMMANHYKQHCPPTPESPCATQNINFKSFKENLKDFLFNIPFDCWKPVKKGSGGQYIKANSKFIGITELAGSGAPTRSPTLVTRPSQHVDAIQEALSLLNNSNDVTAVMNKAVKVVSEVFDPEGPTCLETRLQLYKEGLQGSLTSLKNPLTMMANHYKQHCPPTPESPCATQNINFKSFKENLKDFLFNIPFDCWKPVKKAGSGFNNFTVSFWLRVPKVSASHLESGGSAPTRSPTLVTRPSQHVDAIQEALSLLNNSNDVTAVMNKAVKVVSEVFDPEGPTCLETRLQLYKEGLQGSLTSLKNPLTMMANHYKQHCPPTPESPCATQNINFKSFKENLKDFLFNIPFDCWKPVKKAGSGFNNFTVSFWLRVPKVSASHLEGSGGQYIKANSKFIGITELHHHHHH

SEQ ID NO: 326 - protein, 483 aa, Artificial Sequence
  This is the amino acid sequence of feline Granulocyte-macrophage colony-stimulating factor polyprotein.
APTSSPSSVTRPWQHVDAIKEALSLLNNSSEITAVMNEAVEVVSEMFDPEEPKCMQTHLKLYEQGLRGSLISLKEPLRMMANHYKQHCPLTPETPCETQTITFKNFKENLKDFLFNIPFDCWEPDQKGSGGQYIKANSKFIGITELAGSGAPTSSPSSVTRPWQHVDAIKEALSLLNNSSEITAVMNEAVEVVSEMFDPEEPKCMQTHLKLYEQGLRGSLISLKEPLRMMANHYKQHCPLTPETPCETQTITFKNFKENLKDFLFNIPFDCWEPDQKAGSGFNNFTVSFWLRVPKVSASHLESGGSAPTSSPSSVTRPWQHVDAIKEALSLLNNSSEITAVMNEAVEVVSEMFDPEEPKCMQTHLKLYEQGLRGSLISLKEPLRMMANHYKQHCPLTPETPCETQTITFKNFKENLKDFLFNIPFDCWEPDQKAGSGFNNFTVSFWLRVPKVSASHLEGSGGQYIKANSKFIGITELHHHHHH

SEQ ID NO: 327 - protein, 624 aa, Artificial Sequence
  This is the amino acid sequence of bovine Granulocyte colony-stimulating factor polyprotein.
TPLGPARSLPQSFLLKCLEQVRKIQADGAELQERLCAAHKLCHPEELMLLRHSLGIPQAPLSSCSSQSLQLTSCLNQLHGGLFLYQGLLQALAGISPELAPTLDTLQLDVTDFATNIWLQMEDLGAAPAVQPTQGAMPTFTSAFQRRAGGVLVASQLHRFLELAYRGLRYLAEPGSGGQYIKANSKFIGITELAGSGTPLGPARSLPQSFLLKCLEQVRKIQADGAELQERLCAAHKLCHPEELMLLRHSLGIPQAPLSSCSSQSLQLTSCLNQLHGGLFLYQGLLQALAGISPELAPTLDTLQLDVTDFATNIWLQMEDLGAAPAVQPTQGAMPTFTSAFQRRAGGVLVASQLHRFLELAYRGLRYLAEPAGSGFNNFTVSFWLRVPKVSASHLESGGSTPLGPARSLPQSFLLKCLEQVRKIQADGAELQERLCAAHKLCHPEELMLLRHSLGIPQAPLSSCSSQSLQLTSCLNQLHGGLFLYQGLLQALAGISPELAPTLDTLQLDVTDFATNIWLQMEDLGAAPAVQPTQGAMPTFTSAFQRRAGGVLVASQLHRFLELAYRGLRYLAEPAGSGFNNFTVSFWLRVPKVSASHLEGSGGQYIKANSKFIGITELHHHHHH

SEQ ID NO: 328 - protein, 627 aa, Artificial Sequence
  This is the amino acid sequence of canine Granulocyte colony-stimulating factor polyprotein.
MAPLGPTGPLPQSFLLKCLEQMRKVQADGTALQETLCATHQLCHPEELVLLGHALGIPQPPLSSCSSQALQLMGCLRQLHSGLFLYQGLLQALAGISPELAPTLDTLQLDTTDFAINIWQQMEDLGMAPAVPPTQGTMPAFTSAFQRRAGGVLVASNLQSFLELAYRALRHFAKPGSGGQYIKANSKFIGITELAGSGMAPLGPTGPLPQSFLLKCLEQMRKVQADGTALQETLCATHQLCHPEELVLLGHALGIPQPPLSSCSSQALQLMGCLRQLHSGLFLYQGLLQALAGISPELAPTLDTLQLDTTDFAINIWQQMEDLGMAPAVPPTQGTMPAFTSAFQRRAGGVLVASNLQSFLELAYRALRHFAKPAGSGFNNFTVSFWLRVPKVSASHLESGGSMAPLGPTGPLPQSFLLKCLEQMRKVQADGTALQETLCATHQLCHPEELVLLGHALGIPQPPLSSCSSQALQLMGCLRQLHSGLFLYQGLLQALAGISPELAPTLDTLQLDTTDFAINIWQQMEDLGMAPAVPPTQGTMPAFTSAFQRRAGGVLVASNLQSFLELAYRALRHFAKPAGSGFNNFTVSFWLRVPKVSASHLEGSGGQYIKANSKFIGITELHHHHHH

SEQ ID NO: 329 - protein, 624 aa, Artificial Sequence
  This is the amino acid sequence of feline Granulocyte colony-stimulating factor polyprotein.
TPLGPTSSLPQSFLLKCLEQVRKVQADGTALQERLCAAHKLCHPEELVLLGHALGIPQAPLSSCSSQALQLTGCLRQLHSGLFLYQGLLQALAGISPELAPTLDMLQLDITDFAINIWQQMEDVGMAPAVPPTQGTMPTFTSAFQRRAGGTLVASNLQSFLEVAYRALRHFTKPGSGGQYIKANSKFIGITELAGSGTPLGPTSSLPQSFLLKCLEQVRKVQADGTALQERLCAAHKLCHPEELVLLGHALGIPQAPLSSCSSQALQLTGCLRQLHSGLFLYQGLLQALAGISPELAPTLDMLQLDITDFAINIWQQMEDVGMAPAVPPTQGTMPTFTSAFQRRAGGTLVASNLQSFLEVAYRALRHFTKPAGSGFNNFTVSFWLRVPKVSASHLESGGSTPLGPTSSLPQSFLLKCLEQVRKVQADGTALQERLCAAHKLCHPEELVLLGHALGIPQAPLSSCSSQALQLTGCLRQLHSGLFLYQGLLQALAGISPELAPTLDMLQLDITDFAINIWQQMEDVGMAPAVPPTQGTMPTFTSAFQRRAGGTLVASNLQSFLEVAYRALRHFTKPAGSGFNNFTVSFWLRVPKVSASHLEGSGGQYIKANSKFIGITELHHHHHH

1. A vaccine composition for breaking self-tolerance against a self-protein of a host, wherein the vaccine composition is capable of raising autoantibodies against said self-protein when the vaccine composition is administered to the host, and wherein the vaccine composition comprises:
a) a polyprotein, a DNA encoding for the polyprotein and/or an RNA encoding for the polyprotein, wherein the polyprotein comprises
at least two self-protein segments of the host; and
one or more T-cell epitopes of non-host origin in between and/or adjacent to the at least two self-protein segments;
and
b) one or more immunostimulatory oligonucleotides.

2. The vaccine composition according to claim 1, wherein the one or more T-cell epitopes are selected from the group consisting of an artificial T-cell epitope peptide sequence and a T-cell epitope peptide sequence derived from a non-self protein, optionally from a pathogenic protein.

3. The vaccine composition according to claim 1, wherein the one or more T-cell epitopes are Tetanus toxin T-cell epitopes, optionally a Tetanus toxin T-cell epitope
(i) comprising at least 95% sequence identity with SEQ ID NO: 1, SEQ ID NO: 39 or SEQ ID NO: 2
or
(ii) selected from the group consisting of SEQ ID NO: 1, SEQ ID NO: 39 and SEQ ID NO: 2

4. The vaccine composition according to claim 1, wherein the polyprotein comprises at least three and optionally three self-protein segments.

5. The vaccine composition according to claim 1, wherein the self-protein segment is
(i) a full-length self-protein; or
(ii) a truncated self-protein containing a B-cell epitope; or
(iii) a derivative of a self-protein which has at least 80% sequence identity, optionally at least 90% sequence identity and optionally at least 95% sequence identity to the full-length self-protein.

6. The vaccine composition according to claim 1, wherein the at least two self-protein segments are derived from a cytokine; optionally a cytokine selected from the group consisting of an IL-31, IL-4, IL-5, IL-13, IL-33, and TNF-alpha protein.

7. The vaccine composition according to claim 1, wherein the at least two self-protein segments are derived from an IL-31 protein, optionally canine IL-31 (SEQ ID NO: 3), feline IL-31 (SEQ ID NO: 60), pig IL-31 (SEQ ID NO: 68), chicken IL-31, bovine IL-31, or human IL-31 (SEQ ID NO: 69).

8. The vaccine composition according to claim 1, wherein the at least two self-protein segments are derived from an IL-5 protein, optionally canine IL-5 (SEQ ID NO: 41), feline IL-5 (SEQ ID NO: 76), pig IL-5 (SEQ ID NO: 77), chicken IL-5 (SEQ ID NO: 78 or 79), bovine IL-5 (SEQ ID NO: 80) or human IL-5 (SEQ ID NO: 81).

9. The vaccine composition according to claim 1, wherein the at least two self-protein segments are derived from an IL-4 protein, optionally canine IL-4 (SEQ ID NO: 56), feline IL-4 (SEQ ID NO: 70), pig IL-4 (SEQ ID NO: 71), chicken IL-4 (SEQ ID NO: 72), bovine IL-4 (SEQ ID NO: 73) or human IL-4 (SEQ ID NO: 74 or 75).

10. The vaccine composition according to claim 1, wherein the at least two self-protein segments are derived from an IL-13 protein, optionally canine IL-13 (SEQ ID NO: 46), feline IL-13 (SEQ ID NO: 82), pig IL-13 (SEQ ID NO: 83), chicken IL-13 (SEQ ID NO: 84), bovine IL-13 (SEQ ID NO: 85) or human IL-13 (SEQ ID NO: 86).

11. The vaccine composition according to claim 1, wherein the at least two self-protein segments are derived from an IL-33 protein, optionally canine IL-33 (SEQ ID NO: 50 or 51), feline IL-33 (SEQ ID NO: 87, 88, 89, or 90), pig IL-33 (SEQ ID NO: 91, 92, 93, or 94), bovine IL-33 (SEQ ID NO: 95 or 96) or human IL-33 (SEQ ID NO: 97, 98, 99, or 100).

12. The vaccine composition according to claim 1, wherein the polyprotein has
(i) at least 85% sequence identity with SEQ ID NO: 4, 40, 42, 43, 47, 54, 57, 61, or 65;
or
(ii) the sequence of SEQ ID NO: 4, 40, 42, 43, 47, 54, 57, 61, or 65.

13. The vaccine composition according to claim 1, wherein the polyprotein has
(i) at least 85% sequence identity with SEQ ID NO: 4 or SEQ ID NO: 40;
or
(ii) the sequence of SEQ ID NO: 4 or SEQ ID NO: 40.

14. The vaccine composition according to claim 1, wherein the one or more immunostimulatory oligonucleotides are selected from the group consisting of A-class, B-class, and C-class immunostimulatory oligonucleotides, and mixtures thereof, and wherein optionally the one or more immunostimulatory oligonucleotides are selected from the group consisting of B-class immunostimulatory oligonucleotides.

15. The vaccine composition according to claim 1, wherein at least one or each of the one or more immunostimulatory oligonucleotides
(i) comprise at least 75% sequence identity with SEQ ID NO: 5 or SEQ ID NO: 6; or
(ii) are selected from the group consisting of SEQ ID NO: 5 and SEQ ID NO: 6.

16. The vaccine composition according to claim 1, wherein at least some phosphodiester moieties in the one or more immunostimulatory oligonucleotides have been chemically modified to increase nuclease resistance, optionally have been replaced by phosphorothioate moieties.

17. The vaccine composition according to claim 1, wherein the vaccine composition further comprises an adjuvant conferring a depot effect.

18. A Polyprotein, a DNA encoding for the polyprotein and/or an RNA encoding for the polyprotein for a vaccine composition to break self-tolerance against a self-protein of a host, wherein the polyprotein comprises at least two self-protein segments of the host and one or more T-cell epitopes of non-host origin in between and/or adjacent to the at least two self-protein segments.

19. A product comprising a polyprotein to break self-tolerance against a self-protein of a host, wherein the self-tolerance is broken by production of autoantibodies when the polyprotein is administered to the host, and wherein the polyprotein comprises at least two self-protein segments, and one or more T-cell epitopes of non-host origin in between and/or adjacent to the at least two self-protein segments.

20. The vaccine composition according to claim 1 adapted for a method of preventing or treating a disease in a subject, wherein the method comprises administering the vaccine composition to the subject.

21. The vaccine composition according to claim 20 wherein the subject is a mammal including human and/or non-human animals.

22. The vaccine composition according to claim 21 wherein the subject is an animal selected from the group consisting of cattle, poultry, swine, and companion animals optionally cats and dogs.

23. The vaccine composition according to claim 20, wherein the disease is
a chronic disease selected from the group consisting of an autoimmune disease, AIDS and cancer; or
a pruritic condition, optionally selected from the group consisting of atopic dermatitis, eczema, psoriasis, scleroderma and pruritis; or
an allergic condition, optionally selected from the group consisting of allergic dermatitis, summer eczema, urticaria, heaves, inflammatory airway disease, recurrent airway obstruction, airway hyper-responsiveness, chronic obstruction pulmonary disease and inflammatory process resulting from autoimmunity,
wherein optionally the disease is a pruritic condition or an allergic condition, optionally atopic dermatitis.

24. An enzyme-linked immunosorbent assay method for detecting an autoantibody, optionally obtained against a polyprotein contained in the vaccine composition of claim 1, wherein the method comprises
a) Adsorbing an antigen onto a test surface;
b) Blocking free binding sites on the test surface;
c) Incubating antigen-coated and blocked test surface with a mixture comprising a labeled antibody against the antigen and a to-be-tested autoantibody against the antigen; and
d) Detecting binding of the labeled antibody.

25. The enzyme-linked immunosorbent assay method according to claim 24, wherein the antigen comprises or is the polyprotein of claim 1 or a single protein segment or epitope-carrying peptide thereof.
